(19) United States
(12) Patent Application Publication
(10) Pub. No.: US 2023/0107173 A1
(43) Pub. Date: Apr. 6, 2023

(54) Methods Of Treating Chronic Kidney Disease (CKD) With Inhibitors Of Protective Loss-Of-Function Genes

(71) Applicant: Regeneron Pharmaceuticals, Inc., Tarrytown, NY (US)

(72) Inventors: Mary E. Haas, Tarrytown, NY (US); Luca Andrea Lotta, Tarrytown, NY (US); Aris Baras, Tarrytown, NY (US); Manuel Allen Revez Ferreira, Tarrytown, NY (US); Adam E. Locke, Tarrytown, NY (US); Joshua Backman, Tarrytown, NY (US)

(21) Appl. No.: 17/934,277

(22) Filed: Sep. 22, 2022

Related U.S. Application Data
(60) Provisional application No. 63/247,507, filed on Sep. 23, 2021.

(51) Int. Cl. C12N 15/113

(52) U.S. Cl. CPC C12N 15/1138; C12N 15/1137; C12N 2310/14

(57) ABSTRACT

The present disclosure provides methods of treating a subject having a kidney disease or preventing a subject from developing a kidney disease, and methods of identifying subjects having an increased risk of developing a kidney disease.

### REFERENCE TO SEQUENCE LISTING

[0001] This application includes a Sequence Listing filed electronically as an XML file named 381203594SEQ, created on Sep. 21, 2022, with a size of 1,302 kilobytes. The Sequence Listing is incorporated herein by reference.

### FIELD

[0002] The present disclosure relates generally to the treatment of subjects having kidney disease with Aldehyde Dehydrogenase 1 Family Member L1 (ALDH1L1) inhibitors, Fructose-Bisphosphate Aldolase B (ALDOB) inhibitors, Glucose-6-Phosphatase Catalytic Subunit 1 (G6PC) inhibitors, LDL Receptor Related Protein 2 (LRP2), Ribosomal Protein L3 Like (RPL3L) inhibitors, Solute Carrier Family 25, Member 45 (SLC25A45) inhibitors, Solute Carrier Family 7 Member 9 (SLC7A9) inhibitors, or any combination thereof, and methods of identifying subjects having an increased risk of developing kidney disease.

### BACKGROUND

[0003] In the United States, based on data from the 1999-2006 National Health and Nutrition Examination Survey (NHANES) study, an estimated 11.1 percent (22.4 million) of adults aged 20 or older have chronic kidney disease (CKD) stages 1-3. An additional 0.8 million U.S. adults aged 20 or older have CKD stage 4, and more than 0.3 million have stage 5 CKD and receive hemodialysis. Analyses of NHANES data between 1988-1994 and 1999-2004 suggest that the prevalence of CKD is rising for every CKD stage, but with a particular increase in the prevalence of individuals classified with CKD stage 3. The number of patients with stage 5 CKD requiring dialysis also has increased. It has been estimated that more than 700,000 individuals will have End Stage Renal Disease (ESRD) by 2015. Although CKD can be caused by primary kidney disease (e.g., glomerular diseases, tubulointerstitial diseases, obstruction, and polycystic kidney disease), in the vast majority of patients with CKD, the kidney damage is associated with other medical conditions such as diabetes and hypertension. In 2008, excluding those with ESRD, 48 percent of Medicare patients with CKD had diabetes, 91 percent had hypertension, and 46 percent had atherosclerotic heart disease. Other risk factors for CKD include age, obesity, family history, and ethnicity. CKD has been associated with numerous adverse health outcomes.

[0004] A Glomerular Filtration Rate (GFR) of 90 mL/min or higher (Stage 1) is normal in most healthy people. Usually few symptoms are present at this stage of CKD. A GFR of 60-89 mL/min (Stage 2) may for some patients, such as the elderly or infants, be normal if no kidney damage is present. A GFR between 60-89 mL/min for three months or longer along with kidney damage is a sign of early CKD. Usually few symptoms are present at this stage. A GFR between 30-59 mL/min (Stage 3) for a patient is indicative of moderate CKD, and are more likely to develop anemia, early bone disease or high blood pressure, and may desire to see a nephrologist. A GFR between 15-29 mL/min (Stage 4) indicates that the patient has severe CKD, and will likely need dialysis or a kidney transplant in the future. A GFR of 15 mL/min or less (Stage 5) indicates that the patient has chronic CKD, and have ESRD. The kidneys have lost almost all ability to function effectively at this stage. They will need dialysis or a kidney transplant to live.

[0005] Aldehyde Dehydrogenase 1 Family Member L1 (ALDH1L1) is a member of aldehyde dehydrogenase family, and catalyzes the conversion of 10-formyltetrahydrofolate, nicotinamide adenine dinucleotide phosphate (NADP⁺), and water to tetrahydrofolate, NADPH, and carbon dioxide.

[0006] Fructose-Bisphosphate Aldolase B (ALDOB) is a tetrameric glycolytic enzyme that catalyzes the reversible conversion of fructose-1,6-bisphosphate to glyceraldehyde 3-phosphate and dihydroxyacetone phosphate. Vertebrates have 3 aldolase isozymes which are distinguished by their electrophoretic and catalytic properties. Differences indicate that aldolases A, B, and C are distinct proteins, the products of a family of related ‘housekeeping’ genes exhibiting developmentally regulated expression of the different isozymes. The developing embryo produces aldolase A, which is produced in even greater amounts in adult muscle where it can be as much as 5% of total cellular protein. In adult liver, kidney and intestine, aldolase A expression is repressed and aldolase B is produced. In brain and other nervous tissue, aldolase A and C are expressed about equally. There is a high degree of homology between aldolase A and C. Defects in ALDOB cause hereditary fructose intolerance.

[0007] Glucose-6-Phosphatase Catalytic Subunit 1 (G6PC) is a multi-subunit integral membrane protein of the endoplasmic reticulum that is composed of a catalytic subunit and transporters for G6P, inorganic phosphate, and glucose. Glucose-6-phosphatase catalyzes the hydrolysis of D-glucose 6-phosphate to D-glucose and orthophosphate and is a key enzyme in glucose homeostasis, functioning in gluconeogenesis and glycogenolysis. Mutations in this gene cause glycogen storage disease type I (GSD1). This disease, also known as von Gierke disease, is a metabolic disorder characterized by severe hypoglycemia associated with the accumulation of glycogen and fat in the liver and kidneys.

[0008] LDL Receptor Related Protein 2 (LRP2) is a multi-ligand endocytic receptor that is expressed in many different tissues but primarily in absorptive epithelial tissues such as the kidney. This glycoprotein has a large amino-terminal extracellular domain, a single transmembrane domain, and a short carboxy-terminal cytoplasmic tail. The extracellular ligand-binding-domains bind diverse macromolecules including albumin, apolipoproteins B and E, and lipoprotein lipase. The LRP2 protein is critical for the reuptake of numerous ligands, including lipoproteins, sterols, vitamin-binding proteins, and hormones. This protein also has a role in cell-signaling; extracellular ligands include parathyroid hormones and the morphogen sonic hedgehog while cytosolic ligands include MAP kinase scaffold proteins and JNK interacting proteins.

[0009] Ribosomal Protein L3 Like (RPL3L) gene encodes a protein that shares sequence similarity with ribosomal protein L3. The protein belongs to the L3P family of ribosomal proteins. Unlike the ubiquitous expression of ribosomal protein genes, this gene has a tissue-specific pattern of expression, with the highest levels of expression in skeletal muscle and heart. It is not currently known whether the encoded protein is a functional ribosomal protein or whether it has evolved a function that is independent of the ribosome.

[0010] Solute Carrier Family 25, Member 45 (SLC25A45) belongs to the SLC25 family of mitochondrial carrier proteins, a large family of nuclear-encoded transporters embedded in the inner mitochondrial membrane and in a few cases other organelle membranes. The members of this superfamily are widespread in eukaryotes and involved in numerous metabolic pathways and cell functions. SLC25 members vary greatly in the nature and size of their transported substrates, modes of transport (i.e., uniport, symport or antiport) and driving forces, although the molecular mechanism of substrate translocation may be basically the same.

[0011] Solute Carrier Family 7 Member 9 (SLC7A9) is a member of a family of light subunits of amino acid transporters. This protein plays a role in the high-affinity and sodium-independent transport of cystine and neutral and dibasic amino acids, and appears to function in the reabsorption of cystine in the kidney tubule. Mutations in this gene cause non-type I cystinuria, a disease that leads to cystine stones in the urinary system due to impaired transport of cystine and dibasic amino acids.

### SUMMARY

[0012] The present disclosure provides methods of treating a subject having a kidney disease or preventing a subject from developing a kidney disease, the methods comprising administering one or more ALDH1L1 inhibitors, ALDOB inhibitors, G6PC inhibitors, LRP2 inhibitors, RPL3L inhibitors, SLC25A45 inhibitors, or SLC7A9 inhibitors, or any combination thereof, to the subject.

[0013] The present disclosure also provides methods of treating a subject having chronic kidney disease or preventing a subject from developing chronic kidney disease, the methods comprising administering one or more ALDH1L1 inhibitors, ALDOB inhibitors, G6PC inhibitors, LRP2 inhibitors, RPL3L inhibitors, SLC25A45 inhibitors, or SLC7A9 inhibitors, or any combination thereof, to the subject.

[0014] The present disclosure also provides methods of treating a subject having a kidney stone or preventing a subject from developing a kidney stone, the methods comprising administering one or more ALDH1L1 inhibitors, ALDOB inhibitors, G6PC inhibitors, LRP2 inhibitors, RPL3L inhibitors, SLC25A45 inhibitors, or SLC7A9 inhibitors, or any combination thereof, to the subject.

[0015] The present disclosure also provides methods of treating a subject having chronic glomerulonephritis or preventing a subject from developing chronic glomerulonephritis, the methods comprising administering one or more ALDH1L1 inhibitors, ALDOB inhibitors, G6PC inhibitors, LRP2 inhibitors, RPL3L inhibitors, SLC25A45 inhibitors, or SLC7A9 inhibitors, or any combination thereof, to the subject.

[0016] The present disclosure also provides methods of treating a subject having nephrosis or preventing a subject from developing nephrosis, the methods comprising administering one or more ALDH1L1 inhibitors, ALDOB inhibitors, G6PC inhibitors, LRP2 inhibitors, RPL3L inhibitors, SLC25A45 inhibitors, or SLC7A9 inhibitors, or any combination thereof, to the subject.

[0017] The present disclosure also provides methods of treating a subject having nephronophthisis or preventing a subject from developing nephronophthisis, the methods comprising administering one or more ALDH1L1 inhibitors, ALDOB inhibitors, G6PC inhibitors, LRP2 inhibitors, RPL3L inhibitors, SLC25A45 inhibitors, or SLC7A9 inhibitors, or any combination thereof, to the subject.

[0018] The present disclosure also provides methods of treating a subject having chronic interstitial nephritis or preventing a subject from developing chronic interstitial nephritis, the methods comprising administering one or more ALDH1L1 inhibitors, ALDOB inhibitors, G6PC inhibitors, LRP2 inhibitors, RPL3L inhibitors, SLC25A45 inhibitors, or SLC7A9 inhibitors, or any combination thereof, to the subject.

[0019] The present disclosure also provides methods of treating a subject having nephrosclerosis or preventing a subject from developing nephrosclerosis, the methods comprising administering one or more ALDH1L1 inhibitors, ALDOB inhibitors, G6PC inhibitors, LRP2 inhibitors, RPL3L inhibitors, SLC25A45 inhibitors, or SLC7A9 inhibitors, or any combination thereof, to the subject.

[0020] The present disclosure also provides methods of treating a subject with a therapeutic agent that treats or inhibits a kidney disease wherein the subject has a kidney disease, or preventing a subject from developing a kidney disease by administering a therapeutic agent that prevents a kidney disease, the methods comprising the steps of: determining whether the subject has any one or more variant nucleic acid molecules encoding an ALDH1L1, an ALDOB, a G6PC, an LRP2, an RPL3L, an SLC25A45, or an SLC7A9 predicted loss-of-function polypeptide by: obtaining or having obtained a biological sample from the subject; and performing or having performed a sequence analysis on the biological sample to determine if the subject has a genotype comprising any one or more of ALDH1L1, ALDOB, G6PC, LRP2, RPL3L, SLC25A45, or SLC7A9 variant nucleic acid molecules encoding a predicted loss-of-function polypeptide; and administering or continuing to administer the therapeutic agent that treats, prevents, or inhibits the kidney disease in an amount that is the same as or less than a standard dosage amount to a subject that is ALDH1L1, ALDOB, G6PC, LRP2, RPL3L, SLC25A45, and SLC7A9 reference, and/or administering one or more ALDH1L1 inhibitors, ALDOB inhibitors, G6PC inhibitors, LRP2 inhibitors, RPL3L inhibitors, SLC25A45 inhibitors, or SLC7A9 inhibitors, or any combination thereof, to the subject; administering or continuing to administer the therapeutic agent that treats, prevents, or inhibits the kidney disease in an amount that is the same as or less than a standard dosage amount to a subject that is heterozygous for any one or more of ALDH1L1, ALDOB, G6PC, LRP2, RPL3L, SLC25A45, or SLC7A9 variant nucleic acid molecules, and/or administering one or more ALDH1L1 inhibitors, ALDOB inhibitors, G6PC inhibitors, LRP2 inhibitors, RPL3L inhibitors, SLC25A45 inhibitors, or SLC7A9 inhibitors, or any combination thereof, to the subject; or administering or continuing to administer the therapeutic agent that treats, prevents, or inhibits the kidney disease in a standard dosage amount to a subject that is homozygous for any one or more of ALDH1L1, ALDOB, G6PC, LRP2, RPL3L, SLC25A45, or SLC7A9 variant nucleic acid molecules; wherein the presence of a genotype having one or more of ALDH1L1, ALDOB, G6PC, LRP2, RPL3L, SLC25A45, or SLC7A9 variant nucleic acid molecules indicates the subject has a decreased risk of developing the kidney disease.

[0021] The present disclosure also provides methods of identifying a subject having an increased risk of developing a kidney disease, the methods comprising: determining or having determined the presence or absence of any one or more variant nucleic acid molecules encoding an ALDH1L1, an ALDOB, a G6PC, an LRP2, an RPL3L, an SLC25A45, or an SLC7A9 predicted loss-of-function polypeptide in a biological sample obtained from the subject; wherein: when the subject is ALDH1L1, ALDOB, G6PC, LRP2, RPL3L, SLC25A45, and SLC7A9 reference, then the subject has an increased risk of developing the kidney disease; and when the subject is heterozygous or homozygous for any one or more of ALDH1L1, ALDOB, G6PC, LRP2, RPL3L, SLC25A45, or SLC7A9 variant nucleic acid molecules encoding a predicted loss-of-function polypeptide, then the subject has a decreased risk of developing the kidney disease.

[0022] The present disclosure also provides therapeutic agents that treat, prevent, or inhibit a kidney disease for use in the treatment and/or prevention of a kidney disease in a subject having: one or more of a variant genomic nucleic acid molecule encoding an ALDH1L1, an ALDOB, a G6PC, an LRP2, an RPL3L, an SLC25A45, or an SLC7A9 predicted loss-of-function polypeptide; one or more of a variant mRNA molecule encoding an ALDH1L1, ALDOB, G6PC, LRP2, RPL3L, SLC25A45, or SLC7A9 predicted loss-of-function polypeptide; or one or more of a variant cDNA molecule encoding an ALDH1L1, ALDOB, G6PC, LRP2, RPL3L, SLC25A45, or SLC7A9 predicted loss-of-function polypeptide.

[0023] The present disclosure also provides ALDH1L1 inhibitors for use in the treatment and/or prevention of a kidney disease in a subject that is: a) reference for ALDH1L1; or b) heterozygous for one or more of: i) a variant genomic nucleic acid molecule encoding ALDH1L1 predicted loss-of-function polypeptide; ii) a variant mRNA molecule encoding an ALDH1L1 predicted loss-of-function polypeptide; or iii) a variant cDNA molecule encoding an ALDH1L1 predicted loss-of-function polypeptide.

[0024] The present disclosure also provides ALDOB inhibitors for use in the treatment and/or prevention of a kidney disease in a subject that is: a) reference for ALDOB; or b) heterozygous for one or more of: i) a variant genomic nucleic acid molecule encoding an ALDOB predicted loss-of-function polypeptide; ii) a variant mRNA molecule encoding an ALDOB predicted loss-of-function polypeptide; or iii) a variant cDNA molecule encoding an ALDOB predicted loss-of-function polypeptide.

[0025] The present disclosure also provides G6PC inhibitors for use in the treatment and/or prevention of a kidney disease in a subject that is: a) reference for G6PC; or b) heterozygous for one or more of: i) a variant genomic nucleic acid molecule encoding a G6PC predicted loss-of-function polypeptide; ii) a variant mRNA molecule encoding a G6PC predicted loss-of-function polypeptide; or iii) a variant cDNA molecule encoding a G6PC predicted loss-of-function polypeptide.

[0026] The present disclosure also provides LRP2 inhibitors for use in the treatment and/or prevention of a kidney disease in a subject that is: a) reference for LRP2; or b) heterozygous for one or more of: i) a variant genomic nucleic acid molecule encoding an LRP2 predicted loss-of-function polypeptide; ii) a variant mRNA molecule encoding an LRP2 predicted loss-of-function polypeptide; or iii) a variant cDNA molecule encoding an LRP2 predicted loss-of-function polypeptide.

[0027] The present disclosure also provides RPL3L inhibitors for use in the treatment and/or prevention of a kidney disease in a subject that is: a) reference for RPL3L; or b) heterozygous for one or more of: i) a variant genomic nucleic acid molecule encoding an RPL3L predicted loss-of-function polypeptide; ii) a variant mRNA molecule encoding an RPL3L predicted loss-of-function polypeptide; or iii) a variant cDNA molecule encoding an RPL3L predicted loss-of-function polypeptide.

[0028] The present disclosure also provides SLC25A45 inhibitors for use in the treatment and/or prevention of a kidney disease in a subject that is: a) reference for SLC25A45; or b) heterozygous for one or more of: i) a variant genomic nucleic acid molecule encoding an SLC25A45 predicted loss-of-function polypeptide; ii) a variant mRNA molecule encoding an SLC25A45 predicted loss-of-function polypeptide; or iii) a variant cDNA molecule encoding an SLC25A45 predicted loss-of-function polypeptide.

[0029] The present disclosure also provides SLC7A9 inhibitors for use in the treatment and/or prevention of a kidney disease in a subject that is: a) reference for SLC7A9; or b) heterozygous for one or more of: i) a variant genomic nucleic acid molecule encoding an SLC7A9 predicted loss-of-function polypeptide; ii) a variant mRNA molecule encoding an SLC7A9 predicted loss-of-function polypeptide; or iii) a variant cDNA molecule encoding an SLC7A9 predicted loss-of-function polypeptide.

### BRIEF DESCRIPTION OF THE DRAWINGS

[0030] The accompanying FIGURES, which are incorporated in and constitute a part of this specification, illustrate several aspects and together with the description serve to explain the principles of the present disclosure.

[0031] FIG. 1 shows a burden of pLOF+missense variants in genes associated with increased eGFR show directionally consistent effects (i.e., increased eGFR) for a burden of pLOF variants in the same gene. Effect of burden of pLOF+missense variants as listed in Table 1 is plotted on the x-axis, and burden of pLOF-only variants with AAF>1% is plotted on the y-axis. pLOF indicates predicted loss of function; AAF indicates alternate allele frequency; eGFR indicates estimated glomerular filtration rate.

### DESCRIPTION

[0032] Various terms relating to aspects of the present disclosure are used throughout the specification and claims. Such terms are to be given their ordinary meaning in the art, unless otherwise indicated. Other specifically defined terms are to be construed in a manner consistent with the definitions provided herein.

[0033] Unless otherwise expressly stated, it is in no way intended that any method or aspect set forth herein be construed as requiring that its steps be performed in a specific order. Accordingly, where a method claim does not specifically state in the claims or descriptions that the steps are to be limited to a specific order, it is in no way intended that an order be inferred, in any respect. This holds for any possible non-expressed basis for interpretation, including matters of logic with respect to arrangement of steps or operational flow, plain meaning derived from grammatical organization or punctuation, or the number or type of aspects described in the specification.

[0034] As used herein, the singular forms “a,” “an” and “the” include plural referents unless the context clearly dictates otherwise.

[0035] As used herein, the term “about” means that the recited numerical value is approximate and small variations would not significantly affect the practice of the disclosed embodiments. Where a numerical value is used, unless indicated otherwise by the context, the term “about” means the numerical value can vary by ±10% and remain within the scope of the disclosed embodiments.

[0036] As used herein, the term “comprising” may be replaced with “consisting” or “consisting essentially of” in particular embodiments as desired.

[0037] As used herein, the term “isolated”, in regard to a nucleic acid molecule or a polypeptide, means that the nucleic acid molecule or polypeptide is in a condition other than its native environment, such as apart from blood and/or animal tissue. In some embodiments, an isolated nucleic acid molecule or polypeptide is substantially free of other nucleic acid molecules or other polypeptides, particularly other nucleic acid molecules or polypeptides of animal origin. In some embodiments, the nucleic acid molecule or polypeptide can be in a highly purified form, i.e., greater than 95% pure or greater than 99% pure. When used in this context, the term “isolated” does not exclude the presence of the same nucleic acid molecule or polypeptide in alternative physical forms, such as dimers or Alternately phosphorylated or derivatized forms.

[0038] As used herein, the terms “nucleic acid”, “nucleic acid molecule”, “nucleic acid sequence”, “polynucleotide”, or “oligonucleotide” can comprise a polymeric form of nucleotides of any length, can comprise DNA and/or RNA, and can be single-stranded, double-stranded, or multiple stranded. One strand of a nucleic acid also refers to its complement.

[0039] As used herein, the term “subject” includes any animal, including mammals. Mammals include, but are not limited to, farm animals (such as, for example, horse, cow, pig), companion animals (such as, for example, dog, cat), laboratory animals (such as, for example, mouse, rat, rabbits), and non-human primates. In some embodiments, the subject is a human. In some embodiments, the human is a patient under the care of a physician.

[0040] It has been observed in accordance with the present disclosure that several variant nucleic acid molecules (i.e., ALDH1L1, ALDOB, G6PC, LRP2, RPL3L, SLC25A45, and SLC7A9) encoding a predicted loss-of-function polypeptide (whether these variations are homozygous or heterozygous in a particular subject) associate with a decreased risk of developing a kidney disease. It is believed that these variant nucleic acid molecules encoding predicted loss-of-function polypeptides have not been associated with decreased risk of kidney disease. Moreover, the identification by the present disclosure of the association between additional variants and gene burden masks indicates that these several genes (i.e., ALDH1L1, ALDOB, G6PC, LRP2, RPL3L, SLC25A45, and SLC7A9) themselves (rather than linkage disequilibrium with variants in another gene) is responsible for a protective effect in kidney disease.

[0041] Therefore, subjects that are reference or heterozygous for variant nucleic acid molecules encoding (ALDH1L1, ALDOB, G6PC, LRP2, RPL3L, SLC25A45, and/or SLC7A9) predicted loss-of-function polypeptides may be treated with one or more inhibitors (of ALDH1L1, ALDOB, G6PC, LRP2, RPL3L, SLC25A45, and/or SLC7A9) such that the kidney disease is inhibited or prevented, the symptoms thereof are reduced or prevented, and/or development of symptoms is repressed or prevented. It is also believed that such subjects having a kidney disease may further be treated with therapeutic agents that treat or inhibit the kidney disease.

[0042] For purposes of the present disclosure, any particular subject, such as a human, can be categorized as having one of three ALDH1L1 genotypes: i) ALDH1L1 reference; ii) heterozygous for an ALDH1L1 variant nucleic acid molecule encoding an ALDH1L1 predicted loss-of-function polypeptide; or iii) homozygous for an ALDH1L1 variant nucleic acid molecule encoding an ALDH1L1 predicted loss-of-function polypeptide. A subject is ALDH1L1 reference when the subject does not have a copy of an ALDH1L1 variant nucleic acid molecule encoding an ALDH1L1 predicted loss-of-function polypeptide. A subject is heterozygous for an ALDH1L1 variant nucleic acid molecule encoding an ALDH1L1 predicted loss-of-function polypeptide when the subject has a single copy of an ALDH1L1 variant nucleic acid molecule encoding an ALDH1L1 predicted loss-of-function polypeptide. An ALDH1L1 variant nucleic acid molecule encoding an ALDH1L1 predicted loss-of-function polypeptide is any nucleic acid molecule (such as, a genomic nucleic acid molecule, an mRNA molecule, or a cDNA molecule) encoding a ALDH1L1 polypeptide having a partial loss-of-function, a complete loss-of-function, a predicted partial loss-of-function, or a predicted complete loss-of-function. A subject who has an ALDH1L1 polypeptide having a partial loss-of-function (or predicted partial loss-of-function) is hypomorphic for ALDH1L1. A subject is homozygous for an ALDH1L1 variant nucleic acid molecule encoding an ALDH1L1 predicted loss-of-function polypeptide when the subject has two copies (same or different) of an ALDH1L1 variant nucleic acid molecule encoding an ALDH1L1 predicted loss-of-function polypeptide.

[0043] For purposes of the present disclosure, any particular subject, such as a human, can be categorized as having one of three ALDOB genotypes: i) ALDOB reference; ii) heterozygous for an ALDOB variant nucleic acid molecule encoding an ALDOB predicted loss-of-function polypeptide; or iii) homozygous for an ALDOB variant nucleic acid molecule encoding an ALDOB predicted loss-of-function polypeptide. A subject is ALDOB reference when the subject does not have a copy of an ALDOB variant nucleic acid molecule encoding an ALDOB predicted loss-of-function polypeptide. A subject is heterozygous for an ALDOB variant nucleic acid molecule encoding an ALDOB predicted loss-of-function polypeptide when the subject has a single copy of an ALDOB variant nucleic acid molecule encoding an ALDOB predicted loss-of-function polypeptide. An ALDOB variant nucleic acid molecule encoding an ALDOB predicted loss-of-function polypeptide is any nucleic acid molecule (such as, a genomic nucleic acid molecule, an mRNA molecule, or a cDNA molecule) encoding a variant ALDOB polypeptide having a partial loss-of-function, a complete loss-of-function, a predicted partial loss-of-function, or a predicted complete loss-of-function. A subject who has an ALDOB polypeptide having a partial loss-of-function (or predicted partial loss-of-function) is hypomorphic for ALDOB. A subject is homozygous for an ALDOB variant nucleic acid molecule encoding an ALDOB predicted loss-of-function polypeptide when the subject has two copies (same or different) of an ALDOB variant nucleic acid molecule encoding an ALDOB predicted loss-of-function polypeptide.

[0044] For purposes of the present disclosure, any particular subject, such as a human, can be categorized as having one of three G6PC genotypes: i) G6PC reference; ii) heterozygous for a G6PC variant nucleic acid molecule encoding a G6PC predicted loss-of-function polypeptide; or iii) homozygous for a G6PC variant nucleic acid molecule encoding a G6PC predicted loss-of-function polypeptide. A subject is G6PC reference when the subject does not have a copy of a G6PC variant nucleic acid molecule encoding a G6PC predicted loss-of-function polypeptide. A subject is heterozygous for a G6PC variant nucleic acid molecule encoding a G6PC predicted loss-of-function polypeptide when the subject has a single copy of a G6PC variant nucleic acid molecule encoding a G6PC predicted loss-of-function polypeptide. A G6PC variant nucleic acid molecule encoding a G6PC predicted loss-of-function polypeptide is any nucleic acid molecule (such as, a genomic nucleic acid molecule, an mRNA molecule, or a cDNA molecule) encoding a G6PC polypeptide having a partial loss-of-function, a complete loss-of-function, a predicted partial loss-of-function, or a predicted complete loss-of-function. A subject who has a G6PC polypeptide having a partial loss-of-function (or predicted partial loss-of-function) is hypomorphic for G6PC. A subject is homozygous for a G6PC variant nucleic acid molecule encoding a G6PC predicted loss-of-function polypeptide when the subject has two copies (same or different) of a G6PC variant nucleic acid molecule encoding a G6PC predicted loss-of-function polypeptide.

[0045] For purposes of the present disclosure, any particular subject, such as a human, can be categorized as having one of three LRP2 genotypes: i) LRP2 reference; ii) heterozygous for an LRP2 variant nucleic acid molecule encoding an LRP2 predicted loss-of-function polypeptide; or iii) homozygous for an LRP2 variant nucleic acid molecule encoding an LRP2 predicted loss-of-function polypeptide. A subject is LRP2 reference when the subject does not have a copy of an LRP2 variant nucleic acid molecule encoding an LRP2 predicted loss-of-function polypeptide. A subject is heterozygous for an LRP2 variant nucleic acid molecule encoding an LRP2 predicted loss-of-function polypeptide when the subject has a single copy of an LRP2 variant nucleic acid molecule encoding an LRP2 predicted loss-of-function polypeptide. An LRP2 variant nucleic acid molecule encoding an LRP2 predicted loss-of-function polypeptide is any nucleic acid molecule (such as, a genomic nucleic acid molecule, an mRNA molecule, or a cDNA molecule) encoding an LRP2 polypeptide having a partial loss-of-function, a complete loss-of-function, a predicted partial loss-of-function, or a predicted complete loss-of-function. A subject who has an LRP2 polypeptide having a partial loss-of-function (or predicted partial loss-of-function) is hypomorphic for LRP2. A subject is homozygous for an LRP2 variant nucleic acid molecule encoding an LRP2 predicted loss-of-function polypeptide when the subject has two copies (same or different) of an LRP2 variant nucleic acid molecule encoding an LRP2 predicted loss-of-function polypeptide.

[0046] For purposes of the present disclosure, any particular subject, such as a human, can be categorized as having one of three RPL3L genotypes: i) RPL3L reference; ii) heterozygous for an RPL3L variant nucleic acid molecule encoding an RPL3L predicted loss-of-function polypeptide; or iii) homozygous for an RPL3L variant nucleic acid molecule encoding an RPL3L predicted loss-of-function polypeptide. A subject is RPL3L reference when the subject does not have a copy of an RPL3L variant nucleic acid molecule encoding an RPL3L predicted loss-of-function polypeptide. A subject is heterozygous for an RPL3L variant nucleic acid molecule encoding an RPL3L predicted loss-of-function polypeptide when the subject has a single copy of an RPL3L variant nucleic acid molecule encoding an RPL3L predicted loss-of-function polypeptide. An RPL3L variant nucleic acid molecule encoding an RPL3L predicted loss-of-function polypeptide is any nucleic acid molecule (such as, a genomic nucleic acid molecule, an mRNA molecule, or a cDNA molecule) encoding a RPL3L polypeptide having a partial loss-of-function, a complete loss-of-function, a predicted partial loss-of-function, or a predicted complete loss-of-function. A subject who has an RPL3L polypeptide having a partial loss-of-function (or predicted partial loss-of-function) is hypomorphic for RPL3L. A subject is homozygous for an RPL3L variant nucleic acid molecule encoding an RPL3L predicted loss-of-function polypeptide when the subject has two copies (same or different) of an RPL3L variant nucleic acid molecule encoding an RPL3L predicted loss-of-function polypeptide.

[0047] For purposes of the present disclosure, any particular subject, such as a human, can be categorized as having one of three SLC25A45 genotypes: i) SLC25A45 reference; ii) heterozygous for an SLC25A45 variant nucleic acid molecule encoding an SLC25A45 predicted loss-of-function polypeptide; or iii) homozygous for an SLC25A45 variant nucleic acid molecule encoding an SLC25A45 predicted loss-of-function polypeptide. A subject is SLC25A45 reference when the subject does not have a copy of an SLC25A45 variant nucleic acid molecule encoding an SLC25A45 predicted loss-of-function polypeptide. A subject is heterozygous for an SLC25A45 variant nucleic acid molecule encoding an SLC25A45 predicted loss-of-function polypeptide when the subject has a single copy of an SLC25A45 variant nucleic acid molecule encoding an SLC25A45 predicted loss-of-function polypeptide. An SLC25A45 variant nucleic acid molecule encoding an SLC25A45 predicted loss-of-function polypeptide is any nucleic acid molecule (such as, a genomic nucleic acid molecule, an mRNA molecule, or a cDNA molecule) encoding an SLC25A45 polypeptide having a partial loss-of-function, a complete loss-of-function, a predicted partial loss-of-function, or a predicted complete loss-of-function. A subject who has an SLC25A45 polypeptide having a partial loss-of-function (or predicted partial loss-of-function) is hypomorphic for SLC25A45. A subject is homozygous for an SLC25A45 variant nucleic acid molecule encoding an SLC25A45 predicted loss-of-function polypeptide when the subject has two copies (same or different) of an SLC25A45 variant nucleic acid molecules encoding an SLC25A45 predicted loss-of-function polypeptide.

[0048] For purposes of the present disclosure, any particular subject, such as a human, can be categorized as having one of three SLC7A9 genotypes: i) SLC7A9 reference; ii) heterozygous for an SLC7A9 variant nucleic acid molecule encoding an SLC7A9 predicted loss-of-function polypeptide; or iii) homozygous for an SLC7A9 variant nucleic acid molecule encoding an SLC7A9 predicted loss-of-function polypeptide. A subject is SLC7A9 reference when the subject does not have a copy of an SLC7A9 variant nucleic acid molecule encoding an SLC7A9 predicted loss-of-function polypeptide. A subject is heterozygous for an SLC7A9 variant nucleic acid molecule encoding an SLC7A9 predicted loss-of-function polypeptide when the subject has a single copy of an SLC7A9 variant nucleic acid molecule encoding an SLC7A9 predicted loss-of-function polypeptide. An SLC7A9 variant nucleic acid molecule encoding an SLC7A9 predicted loss-of-function polypeptide is any nucleic acid molecule (such as, a genomic nucleic acid molecule, an mRNA molecule, or a cDNA molecule) encoding a SLC7A9 polypeptide having a partial loss-of-function, a complete loss-of-function, a predicted partial loss-of-function, or a predicted complete loss-of-function. A subject who has an SLC7A9 polypeptide having a partial loss-of-function (or predicted partial loss-of-function) is hypomorphic for SLC7A9. A subject is homozygous for an SLC7A9 variant nucleic acid molecule encoding an SLC7A9 predicted loss-of-function polypeptide when the subject has two copies (same or different) of an SLC7A9 variant nucleic acid molecule encoding an SLC7A9 predicted loss-of-function polypeptide.

[0049] For subjects that are genotyped or determined to be ALDH1L1 reference, such subjects have an increased risk of developing a kidney disease, such as chronic kidney disease, a kidney stone, chronic glomerulonephritis, nephrosis, nephronophthisis, chronic interstitial nephritis, and/or nephrosclerosis. For subjects that are genotyped or determined to be either ALDH1L1 reference or heterozygous for an ALDH1L1 variant nucleic acid molecule encoding an ALDH1L1 predicted loss-of-function polypeptide, such subjects or subjects can be treated with an ALDH1L1 inhibitor.

[0050] For subjects that are genotyped or determined to be ALDOB reference, such subjects have an increased risk of developing a kidney disease, such as chronic kidney disease, a kidney stone, chronic glomerulonephritis, nephrosis, nephronophthisis, chronic interstitial nephritis, and/or nephrosclerosis. For subjects that are genotyped or determined to be either ALDOB reference or heterozygous for an ALDOB variant nucleic acid molecule encoding an ALDOB predicted loss-of-function polypeptide, such subjects or subjects can be treated with an ALDOB inhibitor.

[0051] For subjects that are genotyped or determined to be G6PC reference, such subjects have an increased risk of developing a kidney disease, such as chronic kidney disease, a kidney stone, chronic glomerulonephritis, nephrosis, nephronophthisis, chronic interstitial nephritis, and/or nephrosclerosis. For subjects that are genotyped or determined to be either G6PC reference or heterozygous for a G6PC variant nucleic acid molecule encoding a G6PC predicted loss-of-function polypeptide, such subjects or subjects can be treated with a G6PC inhibitor.

[0052] For subjects that are genotyped or determined to be LRP2 reference, such subjects have an increased risk of developing a kidney disease, such as chronic kidney disease, a kidney stone, chronic glomerulonephritis, nephrosis, nephronophthisis, chronic interstitial nephritis, and/or nephrosclerosis. For subjects that are genotyped or determined to be either LRP2 reference or heterozygous for an LRP2 variant nucleic acid molecule encoding an LRP2 predicted loss-of-function polypeptide, such subjects or subjects can be treated with an LRP2 inhibitor.

[0053] For subjects that are genotyped or determined to be SLC25A45 reference, such subjects have an increased risk of developing a kidney disease, such as chronic kidney disease, a kidney stone, chronic glomerulonephritis, nephrosis, nephronophthisis, chronic interstitial nephritis, and/or nephrosclerosis. For subjects that are genotyped or determined to be either SLC25A45 reference or heterozygous for an SLC25A45 variant nucleic acid molecule encoding an SLC25A45 predicted loss-of-function polypeptide, such subjects or subjects can be treated with an SLC25A45 inhibitor.

[0054] For subjects that are genotyped or determined to be SLC7A9 reference, such subjects have an increased risk of developing a kidney disease, such as chronic kidney disease, a kidney stone, chronic glomerulonephritis, nephrosis, nephronophthisis, chronic interstitial nephritis, and/or nephrosclerosis. For subjects that are genotyped or determined to be either SLC7A9 reference or heterozygous for an SLC7A9 variant nucleic acid molecule encoding an SLC7A9 predicted loss-of-function polypeptide, such subjects or subjects can be treated with an SLC7A9 inhibitor.

[0055] For subjects who are determined to be reference for any combination of ALDH1L1, ALDOB, G6PC, LRP2, RPL3L, SLC7A9, and/or SLC25A45, such subjects have an increased risk of developing a kidney disease, such as chronic kidney disease, a kidney stone, chronic glomerulonephritis, nephrosis, nephronophthisis, chronic interstitial nephritis, and/or nephrosclerosis. For subjects that are genotyped or determined to be either reference for any combination of ALDH1L1, ALDOB, G6PC, LRP2, RPL3L, SLC7A9, and/or SLC25A45 or heterozygous for any combination of ALDH1L1, ALDOB, G6PC, LRP2, RPL3L, SLC7A9, and/or SLC25A45 variant nucleic acid molecules encoding corresponding predicted loss-of-function polypeptides, such subjects or subjects can be treated with a corresponding combination of inhibitors of ALDH1L1, ALDOB, G6PC, LRP2, RPL3L, SLC7A9, and/or SLC25A45.

[0056] In any of the embodiments described herein, the subject in whom a kidney disease is prevented by administering one or more of the ALDH1L1 inhibitors, ALDOB inhibitors, G6PC inhibitors, LRP2 inhibitors, RPL3L inhibitors, SLC25A45 inhibitors, and/or SLC7A9 inhibitors can be anyone at risk for developing a kidney disease including, but not limited to, chronic kidney disease, a kidney stone, chronic glomerulonephritis, nephrosis, nephronophthisis, chronic interstitial nephritis, and/or nephrosclerosis. In addition, in some embodiments, any subject can be at risk of developing a kidney disease. In some embodiments, administering one or more of the ALDH1L1 inhibitors, ALDOB inhibitors, G6PC inhibitors, LRP2 inhibitors, RPL3L inhibitors, SLC25A45 inhibitors, and/or SLC7A9 inhibitors may be carried out to prevent development of an additional kidney disease in a subject who has already had a kidney disease.

[0057] In any of the embodiments described herein, the ALDH1L1 variant nucleic acid molecules encoding an ALDH1L1 predicted loss-of-function polypeptide can be any nucleic acid molecule (such as, for example, genomic nucleic acid molecule, mRNA molecule, or cDNA molecule) encoding an ALDH1L1 polypeptide having a partial loss-of-function, a complete loss-of-function, a predicted partial loss-of-function, or a predicted complete loss-of-function. In some embodiments, the ALDH1L1 variant nucleic acid molecule encoding an ALDH1L1 predicted loss-of-function polypeptide is associated with a reduced in vitro response to ALDH1L1 ligands compared with reference ALDH1L1. In some embodiments, the ALDH1L1 variant nucleic acid molecule encoding an ALDH1L1 predicted loss-of-function polypeptide is an ALDH1L1 variant that results or is predicted to result in a premature truncation of an ALDH1L1 polypeptide compared to the human reference genome sequence. In some embodiments, the ALDH1L1 variant nucleic acid molecule encoding an ALDH1L1 predicted loss-of-function polypeptide is a variant that is predicted to be damaging by in vitro prediction algorithms such as Polyphen, SIFT, or similar algorithms. In some embodiments, the ALDH1L1 variant nucleic acid molecule encoding an ALDH1L1 predicted loss-of-function polypeptide is a variant that causes or is predicted to cause a nonsynonymous amino-acid substitution in ALDH1L1 and whose allele frequency is less than 1/100 alleles in the population from which the subject is selected. In some embodiments, the ALDH1L1 variant nucleic acid molecule encoding an ALDH1L1 predicted loss-of-function polypeptide is any rare missense variant (allele frequency <0.1%; or 1 in 1,000 alleles), or any splice-site, stop-gain, start-loss, stop-loss, frameshift, or in-frame indel, or other frameshift ALDH1L1 variant.

[0058] In any of the embodiments described herein, the ALDH1L1 predicted loss-of-function polypeptide can be any ALDH1L1 polypeptide having a partial loss-of-function, a complete loss-of-function, a predicted partial loss-of-function, or a predicted complete loss-of-function.

[0059] In any of the embodiments described herein, the ALDH1L1 variant nucleic acid molecule encoding an ALDH1L1 predicted loss-of-function polypeptide can include variations at positions of chromosome 3 using the nucleotide sequence of the ALDH1L1 reference genomic nucleic acid molecule (SEQ ID NO:1; chr3:126,103,562-126,180,802 in the GRCh38/hg38 human genome assembly) as a reference sequence.

[0060] Numerous genetic variants in ALDH1L1 exist which cause subsequent changes in the ALDH1L1 polypeptide sequence including, but not limited to, rs143122118 (3:126160912:C:T) and rs775766256 (3:126110055:G:C) (according to the GRCh38/hg38 human genome assembly).

[0061] In any of the embodiments described herein, the ALDOB variant nucleic acid molecule encoding an ALDOB predicted loss-of-function polypeptide can be any nucleic acid molecule (such as, for example, genomic nucleic acid molecule, mRNA molecule, or cDNA molecule) encoding an ALDOB variant polypeptide having a partial loss-of-function, a complete loss-of-function, a predicted partial loss-of-function, or a predicted complete loss-of-function. In some embodiments, the ALDOB variant nucleic acid molecule encoding an ALDOB predicted loss-of-function polypeptide is associated with a reduced in vitro response to ALDOB ligands compared with reference ALDOB. In some embodiments, the ALDOB variant nucleic acid molecule encoding an ALDOB predicted loss-of-function polypeptide is an ALDOB variant that results or is predicted to result in a premature truncation of an ALDOB polypeptide compared to the human reference genome sequence. In some embodiments, the ALDOB variant nucleic acid molecule encoding an ALDOB predicted loss-of-function polypeptide is a variant that is predicted to be damaging by in vitro prediction algorithms such as Polyphen, SIFT, or similar algorithms. In some embodiments, the ALDOB variant nucleic acid molecule encoding an ALDOB predicted loss-of-function polypeptide is a variant that causes or is predicted to cause a nonsynonymous amino-acid substitution in ALDOB and whose allele frequency is less than 1/100 alleles in the population from which the subject is selected. In some embodiments, the ALDOB variant nucleic acid molecule encoding an ALDOB predicted loss-of-function polypeptide is any rare missense variant (allele frequency <0.1%; or 1 in 1,000 alleles), or any splice-site, stop-gain, start-loss, stop-loss, frameshift, or in-frame indel, or other frameshift ALDOB variant.

[0062] In any of the embodiments described herein, the ALDOB predicted loss-of-function polypeptide can be any ALDOB polypeptide having a partial loss-of-function, a complete loss-of-function, a predicted partial loss-of-function, or a predicted complete loss-of-function.

[0063] In any of the embodiments described herein, the ALDOB variant nucleic acid molecule encoding an ALDOB predicted loss-of-function polypeptide can include variations at positions of chromosome 9 using the nucleotide sequence of the ALDOB reference genomic nucleic acid molecule (SEQ ID NO:73; chr9:101,421,439-101,449,664 in the GRCh38/hg38 human genome assembly) as a reference sequence.

[0064] Numerous genetic variants in ALDOB exist which cause subsequent changes in the ALDOB polypeptide sequence including, but not limited to, rs1800546 (9:101427574:C:G), rs201397971 (9:101429913:G:A), and 9:101426570:C:A (according to the GRCh38/hg38 human genome assembly).

[0065] In any of the embodiments described herein, the G6PC variant nucleic acid molecule encoding a G6PC predicted loss-of-function polypeptide can be any nucleic acid molecule (such as, for example, genomic nucleic acid molecule, mRNA molecule, or cDNA molecule) encoding a G6PC variant polypeptide having a partial loss-of-function, a complete loss-of-function, a predicted partial loss-of-function, or a predicted complete loss-of-function. In some embodiments, the G6PC variant nucleic acid molecule encoding a G6PC predicted loss-of-function polypeptide is associated with a reduced in vitro response to G6PC ligands compared with reference G6PC. In some embodiments, the G6PC variant nucleic acid molecule encoding a G6PC predicted loss-of-function polypeptide is a G6PC variant that results or is predicted to result in a premature truncation of a G6PC polypeptide compared to the human reference genome sequence. In some embodiments, the G6PC variant nucleic acid molecule encoding a G6PC predicted loss-of-function polypeptide is a variant that is predicted to be damaging by in vitro prediction algorithms such as Polyphen, SIFT, or similar algorithms. In some embodiments, the G6PC variant nucleic acid molecule encoding a G6PC predicted loss-of-function polypeptide is a variant that causes or is predicted to cause a nonsynonymous amino-acid substitution in G6PC and whose allele frequency is less than 1/100 alleles in the population from which the subject is selected. In some embodiments, the G6PC variant nucleic acid molecule encoding a G6PC predicted loss-of-function polypeptide is any rare missense variant (allele frequency <0.1%; or 1 in 1,000 alleles), or any splice-site, stop-gain, start-loss, stop-loss, frameshift, or in-frame indel, or other frameshift G6PC variant.

[0066] In any of the embodiments described herein, the G6PC predicted loss-of-function polypeptide can be any G6PC polypeptide having a partial loss-of-function, a complete loss-of-function, a predicted partial loss-of-function, or a predicted complete loss-of-function.

[0067] In any of the embodiments described herein, the G6PC variant nucleic acid molecule encoding a G6PC predicted loss-of-function polypeptide can include variations at positions of chromosome 17 using the nucleotide sequence of the G6PC reference genomic nucleic acid molecule (SEQ ID NO:102; chr17:42,900,799-42,914,438 in the GRCh38/hg38 human genome assembly) as a reference sequence.

[0068] Numerous genetic variants in G6PC exist which cause subsequent changes in the G6PC polypeptide sequence including, but not limited to, rs1251265849 (17:42900952:TC:T), rs746978011 (17:42911417:G:T), rs1801175 (17:42903947:C:T), rs1157674386 (17:42903998:C:T), rs80356487 (17:42911391:C:T), and 17:42900910:G:C (according to the GRCh38/hg38 human genome assembly).

[0069] In any of the embodiments described herein, the LRP2 variant nucleic acid molecule encoding an LRP2 predicted loss-of-function polypeptide can be any nucleic acid molecule (such as, for example, genomic nucleic acid molecule, mRNA molecule, or cDNA molecule) encoding an LRP2 variant polypeptide having a partial loss-of-function, a complete loss-of-function, a predicted partial loss-of-function, or a predicted complete loss-of-function. In some embodiments, the LRP2 variant nucleic acid molecule encoding an LRP2 predicted loss-of-function polypeptide is associated with a reduced in vitro response to LRP2 ligands compared with reference LRP2. In some embodiments, the LRP2 variant nucleic acid molecule encoding an LRP2 predicted loss-of-function polypeptide is an LRP2 variant that results or is predicted to result in a premature truncation of an LRP2 polypeptide compared to the human reference genome sequence. In some embodiments, the LRP2 variant nucleic acid molecule encoding an LRP2 predicted loss-of-function polypeptide is a variant that is predicted to be damaging by in vitro prediction algorithms such as Polyphen, SIFT, or similar algorithms. In some embodiments, the LRP2 variant nucleic acid molecule encoding an LRP2 predicted loss-of-function polypeptide is a variant that causes or is predicted to cause a nonsynonymous amino-acid substitution in LRP2 and whose allele frequency is less than 1/100 alleles in the population from which the subject is selected. In some embodiments, the LRP2 variant nucleic acid molecule encoding an LRP2 predicted loss-of-function polypeptide is any rare missense variant (allele frequency <0.1%; or 1 in 1,000 alleles), or any splice-site, stop-gain, start-loss, stop-loss, frameshift, or in-frame indel, or other frameshift LRP2 variant.

[0070] In any of the embodiments described herein, the LRP2 predicted loss-of-function polypeptide can be any LRP2 polypeptide having a partial loss-of-function, a complete loss-of-function, a predicted partial loss-of-function, or a predicted complete loss-of-function.

[0071] In any of the embodiments described herein, the LRP2 variant nucleic acid molecule encoding an LRP2 predicted loss-of-function polypeptide can include variations at positions of chromosome 2 using the nucleotide sequence of the LRP2 reference genomic nucleic acid molecule (SEQ ID NO:120; chr2:169,127,109-169,362,534 in the GRCh38/hg38 human genome assembly) as a reference sequence.

[0072] Numerous genetic variants in LRP2 exist which cause subsequent changes in the LRP2 polypeptide sequence including, but not limited to, rs200475391 (2:169170643:T:A), rs34355135 (2:169173147:C:T), rs200475391 (2:169170643:T:A), 2:169174132:A:G, and 2:169174132:A:G (according to the GRCh38/hg38 human genome assembly).

[0073] In any of the embodiments described herein, the RPL3L variant nucleic acid molecule encoding an RPL3L predicted loss-of-function polypeptide can be any nucleic acid molecule (such as, for example, genomic nucleic acid molecule, mRNA molecule, or cDNA molecule) encoding an RPL3L variant polypeptide having a partial loss-of-function, a complete loss-of-function, a predicted partial loss-of-function, or a predicted complete loss-of-function. In some embodiments, the RPL3L variant nucleic acid molecule encoding an RPL3L predicted loss-of-function polypeptide is associated with a reduced in vitro response to RPL3L ligands compared with reference RPL3L. In some embodiments, the RPL3L variant nucleic acid molecule encoding an RPL3L predicted loss-of-function polypeptide is an RPL3L variant that results or is predicted to result in a premature truncation of an RPL3L polypeptide compared to the human reference genome sequence. In some embodiments, the RPL3L variant nucleic acid molecule encoding an RPL3L predicted loss-of-function polypeptide is a variant that is predicted to be damaging by in vitro prediction algorithms such as Polyphen, SIFT, or similar algorithms. In some embodiments, the RPL3L variant nucleic acid molecule encoding an RPL3L predicted loss-of-function polypeptide is a variant that causes or is predicted to cause a nonsynonymous amino-acid substitution in RPL3L and whose allele frequency is less than 1/100 alleles in the population from which the subject is selected. In some embodiments, the RPL3L variant nucleic acid molecule encoding an RPL3L predicted loss-of-function polypeptide is any rare missense variant (allele frequency <0.1%; or 1 in 1,000 alleles), or any splice-site, stop-gain, start-loss, stop-loss, frameshift, or in-frame indel, or other frameshift RPL3L variant.

[0074] In any of the embodiments described herein, the RPL3L predicted loss-of-function polypeptide can be any RPL3L polypeptide having a partial loss-of-function, a complete loss-of-function, a predicted partial loss-of-function, or a predicted complete loss-of-function.

[0075] In any of the embodiments described herein, the RPL3L variant nucleic acid molecule encoding an RPL3L predicted loss-of-function polypeptide can include variations at positions of chromosome 16 using the nucleotide sequence of the RPL3L reference genomic nucleic acid molecule (SEQ ID NO:144; chr16:1,943,974-1,954,689 in the GRCh38/hg38 human genome assembly) as a reference sequence.

[0076] Numerous genetic variants in RPL3L exist which cause subsequent changes in the RPL3L polypeptide sequence including, but not limited to, rs113956264 (16:1947003:C:T) and rs140185678 (16:1953015:G:A) (according to the GRCh38/hg38 human genome assembly).

[0077] In any of the embodiments described herein, the SLC25A45 variant nucleic acid molecule encoding an SLC25A45 predicted loss-of-function polypeptide can be any nucleic acid molecule (such as, for example, genomic nucleic acid molecule, mRNA molecule, or cDNA molecule) encoding an SLC25A45 variant polypeptide having a partial loss-of-function, a complete loss-of-function, a predicted partial loss-of-function, or a predicted complete loss-of-function. In some embodiments, the SLC25A45 variant nucleic acid molecule encoding an SLC25A45 predicted loss-of-function polypeptide is associated with a reduced in vitro response to SLC25A45 ligands compared with reference SLC25A45. In some embodiments, the SLC25A45 variant nucleic acid molecule encoding an SLC25A45 predicted loss-of-function polypeptide is an SLC25A45 variant that results or is predicted to result in a premature truncation of an SLC25A45 polypeptide compared to the human reference genome sequence. In some embodiments, the SLC25A45 variant nucleic acid molecule encoding an SLC25A45 predicted loss-of-function polypeptide is a variant that is predicted to be damaging by in vitro prediction algorithms such as Polyphen, SIFT, or similar algorithms. In some embodiments, the SLC25A45 variant nucleic acid molecule encoding an SLC25A45 predicted loss-of-function polypeptide is a variant that causes or is predicted to cause a nonsynonymous amino-acid substitution in SLC25A45 and whose allele frequency is less than 1/100 alleles in the population from which the subject is selected. In some embodiments, the SLC25A45 variant nucleic acid molecule encoding an SLC25A45 predicted loss-of-function polypeptide is any rare missense variant (allele frequency <0.1%; or 1 in 1,000 alleles), or any splice-site, stop-gain, start-loss, stop-loss, frameshift, or in-frame indel, or other frameshift SLC25A45 variant.

[0078] In any of the embodiments described herein, the SLC25A45 predicted loss-of-function polypeptide can be any SLC25A45 polypeptide having a partial loss-of-function, a complete loss-of-function, a predicted partial loss-of-function, or a predicted complete loss-of-function.

[0079] In any of the embodiments described herein, the SLC25A45 variant nucleic acid molecule encoding an SLC25A45 predicted loss-of-function polypeptide can include variations at positions of chromosome 11 using the nucleotide sequence of the SLC25A45 reference genomic nucleic acid molecule (SEQ ID NO:159; chr11:65,375,192-65,382,671 in the GRCh38/hg38 human genome assembly) as a reference sequence.

[0080] Numerous genetic variants in SLC25A45 exist which cause subsequent changes in the SLC25A45 polypeptide sequence including, but not limited to, rs34400381 (11:65376421:G:A) and rs78829599 (11:65379542:C:T) (according to the GRCh38/hg38 human genome assembly).

[0081] In any of the embodiments described herein, the SLC7A9 variant nucleic acid molecule encoding an SLC7A9 predicted loss-of-function polypeptide can be any nucleic acid molecule (such as, for example, genomic nucleic acid molecule, mRNA molecule, or cDNA molecule) encoding an SLC7A9 variant polypeptide having a partial loss-of-function, a complete loss-of-function, a predicted partial loss-of-function, or a predicted complete loss-of-function. In some embodiments, the SLC7A9 variant nucleic acid molecule encoding an SLC7A9 predicted loss-of-function polypeptide is associated with a reduced in vitro response to SLC7A9 ligands compared with reference SLC7A9. In some embodiments, the SLC7A9 variant nucleic acid molecule encoding an SLC7A9 predicted loss-of-function polypeptide is an SLC7A9 variant that results or is predicted to result in a premature truncation of an SLC7A9 polypeptide compared to the human reference genome sequence. In some embodiments, the SLC7A9 variant nucleic acid molecule encoding an SLC7A9 predicted loss-of-function polypeptide is a variant that is predicted to be damaging by in vitro prediction algorithms such as Polyphen, SIFT, or similar algorithms. In some embodiments, the SLC7A9 variant nucleic acid molecule encoding an SLC7A9 predicted loss-of-function polypeptide is a variant that causes or is predicted to cause a nonsynonymous amino-acid substitution in SLC7A9 and whose allele frequency is less than 1/100 alleles in the population from which the subject is selected. In some embodiments, the SLC7A9 variant nucleic acid molecule encoding an SLC7A9 predicted loss-of-function polypeptide is any rare missense variant (allele frequency <0.1%; or 1 in 1,000 alleles), or any splice-site, stop-gain, start-loss, stop-loss, frameshift, or in-frame indel, or other frameshift SLC7A9 variant.

[0082] In any of the embodiments described herein, the SLC7A9 predicted loss-of-function polypeptide can be any SLC7A9 polypeptide having a partial loss-of-function, a complete loss-of-function, a predicted partial loss-of-function, or a predicted complete loss-of-function.

[0083] In any of the embodiments described herein, the SLC7A9 variant nucleic acid molecule encoding an SLC7A9 predicted loss-of-function polypeptide can include variations at positions of chromosome 19 using the nucleotide sequence of the SLC7A9 reference genomic nucleic acid molecule (SEQ ID NO:205; chr19:32,830,511-32,869,767 in the GRCh38/hg38 human genome assembly) as a reference sequence.

[0084] Numerous genetic variants in SLC7A9 exist which cause subsequent changes in the SLC7A9 polypeptide sequence including, but not limited to, rs79389353 (19:32862521:C:T) and rs121908480 (19:32864261:C:T) (according to the GRCh38/hg38 human genome assembly).

[0085] Any one or more (i.e., any combination) of the ALDH1L1, ALDOB, G6PC, LRP2, RPL3L, SLC25A45, or SLC7A9 variant nucleic acid molecules encoding ALDH1L1, ALDOB, G6PC, LRP2, RPL3L, SLC25A45, or SLC7A9 predicted loss-of-function polypeptides can be used within any of the methods described herein to determine whether a subject has an increased risk of developing kidney disease. The combinations of particular variants can form a mask used for statistical analysis of the particular correlation of ALDH1L1, ALDOB, G6PC, LRP2, RPL3L, SLC25A45, and/or SLC7A9 and decreased risk of developing kidney disease.

[0086] In any of the embodiments described herein, the kidney disease is chronic kidney disease, a kidney stone, chronic glomerulonephritis, nephrosis, nephronophthisis, chronic interstitial nephritis, and/or nephrosclerosis. In some embodiments, the kidney disease is chronic kidney disease. In some embodiments, the kidney disease is a kidney stone. In some embodiments, the kidney disease is chronic glomerulonephritis. In some embodiments, the kidney disease is nephrosis. In some embodiments, the kidney disease is nephronophthisis. In some embodiments, the kidney disease is chronic interstitial nephritis. In some embodiments, the kidney disease is nephrosclerosis.

[0087] Other kidney disease include, but are not limited to, acquired cystic disease, acute (postinfectious) glomerulonephritis, acute infectious interstitial nephritis, acute interstitial nephritis, acute pyelonephritis, acute renal failure, acute transplant failure, acute tubular necrosis, adult polycystic kidney disease, AL amyloid, analgesic nephrosis, anti-glomerular basement membrane disease (Goodpasture's Syndrome), asymptomatic hematuria, asymptomatic proteinuria, autosomal dominant polycystic kidney disease, autosomal recessive polycystic kidney disease, Bence Jones cast nephrosis, benign familial hematuria, benign nephrosclerosis and atheromatous embolization, bilateral cortical necrosis, chronic glomerulonephritis, chronic interstitial nephritis, chronic pyelonephritis, chronic renal failure, chronic transplant failure, circulating immune complex nephritis, crescentic glomerulonephritis, cryoglobulinemia, cystic renal dysplasia, diabetic glomerulosclerosis, diabetic nephrosis, dialysis cystic disease, drug induced (allergic) acute interstitial nephritis, ectopic kidney, Fabry's disease, familial juvenile nephronophthisis-medullary cystic disease complex, focal glomerulosclerosis (segmental hyalinosis), glomerulocystic disease, glomerulonephritis, glomerulonephritis associated with bacterial endocarditis, glomerulosclerosis, hemolytic-uremic syndrome, Henoch-Schonlein purpura, hepatitis-associated glomerulonephritis, hereditary nephritis (Alport syndrome), horseshoe kidney, hydronephrosis, IgA nephrosis, infantile polycystic kidney disease, ischemic acute tubular necrosis, light-cahin deposit disease, malignant nephrosclerosis, medullary cystic disease, membranoproliferative (mesangiocapillary) glomerulonephritis, membranous glomerulonephritis, membranous nephrosis, mesangial proliferative glomerulonephritis (includes Berger's Disease), minimal change glomerular disease, minimal change nephrotic syndrome, nephritic syndrome, nephroblastoma (Wilms tumor), nephronophthisis (medullary cystic disease complex), nephrotic syndrome, plasma cell dyscrasias (monoclonal immunoglobulin-induced renal damage), polyarteritis nodosa, proteinuria, pyelonephritis, rapidly progressive (crescentic) glomerulonephritis, renal agenesis, renal amyloidosis, renal cell carcinoma, renal dysgenesis, renal dysplasia, renal hypoplasia, renal infection, renal osteodystrophy, renal stones (urolithiasis), renal tubular acidosis, renal vasculitis, renovascular hypertension, scleroderma (progressive systemic sclerosis), secondary acquired glomerulonephritis, simple renal cysts, systemic lupus erythematosus, thin basement membrane nephrosis, thrombotic microangiopathy, thrombotic thrombocytopenic purpura, toxic acute tubular necrosis, tubular defects, tubulointerstitial disease in multiple myeloma, urate nephrosis, urinary obstruction, and vasculitis.

[0088] Symptoms of chronic kidney disease include, but are not limited to, nausea, vomiting, loss of appetite, fatigue and weakness, sleep problems, changes urination volume, decreased mental sharpness, muscle twitches and cramps, swelling of feet and ankles, persistent itching, chest pain, fluid build-up around the lining of the heart, shortness of breath, fluid build-up in the lungs, and high blood pressure (hypertension) that's difficult to control.

[0089] Symptoms of a kidney stone include, but are not limited to, severe, sharp pain in the side and back, below the ribs, pain that radiates to the lower abdomen and groin, pain that comes in waves and fluctuates in intensity, pain or burning sensation while urinating, pink, red or brown urine, cloudy or foul-smelling urine, a persistent need to urinate, urinating more often than usual or urinating in small amounts, nausea and vomiting, and fever and chills if an infection is present.

[0090] Symptoms of chronic glomerulonephritis include, but are not limited to, pink or cola-colored urine from red blood cells in your urine (hematuria), foamy urine due to excess protein (proteinuria), high blood pressure (hypertension), and fluid retention (edema) with swelling evident in the face, hands, feet and abdomen.

[0091] Symptoms of nephrosis include, but are not limited to, severe swelling (edema), particularly around eyes and in ankles and feet, foamy urine as a result of excess protein in the urine, weight gain due to fluid retention, fatigue, loss of appetite.

[0092] Symptoms of nephronophthisis include, but are not limited to, increased urine production (polyuria), excessive thirst (polydipsia), general weakness, and extreme tiredness (fatigue).

[0093] Symptoms of chronic interstitial nephritis include, but are not limited to, blood in the urine, fever, increased or decreased urine output, mental status changes (drowsiness, confusion, coma), nausea, vomiting, rash, swelling of any area of body, and weight gain (from retaining fluid).

[0094] Symptoms of nephrosclerosis include, but are not limited to, impaired vision, blood in the urine, loss of weight, and the accumulation of urea and other nitrogenous waste products in the blood, a condition known as uremia.

[0095] The present disclosure provides methods of treating a subject having a kidney disease, the methods comprising administering one or more ALDH1L1 inhibitors, ALDOB inhibitors, G6PC inhibitors, LRP2 inhibitors, RPL3L inhibitors, SLC25A45 inhibitors, and/or SLC7A9 inhibitors, or any combination thereof, to the subject.

[0096] The present disclosure also provides methods of treating a subject having chronic kidney disease, the methods comprising administering one or more ALDH1L1 inhibitors, ALDOB inhibitors, G6PC inhibitors, LRP2 inhibitors, RPL3L inhibitors, SLC25A45 inhibitors, and/or SLC7A9 inhibitors, or any combination thereof, to the subject.

[0097] The present disclosure also provides methods of treating a subject having a kidney stone, the methods comprising administering one or more ALDH1L1 inhibitors, ALDOB inhibitors, G6PC inhibitors, LRP2 inhibitors, RPL3L inhibitors, SLC25A45 inhibitors, and/or SLC7A9 inhibitors, or any combination thereof, to the subject.

[0098] The present disclosure also provides methods of treating a subject having chronic glomerulonephritis, the methods comprising administering one or more ALDH1L1 inhibitors, ALDOB inhibitors, G6PC inhibitors, LRP2 inhibitors, RPL3L inhibitors, SLC25A45 inhibitors, and/or SLC7A9 inhibitors, or any combination thereof, to the subject.

[0099] The present disclosure also provides methods of treating a subject having nephrosis, the methods comprising administering one or more ALDH1L1 inhibitors, ALDOB inhibitors, G6PC inhibitors, LRP2 inhibitors, RPL3L inhibitors, SLC25A45 inhibitors, and/or SLC7A9 inhibitors, or any combination thereof, to the subject.

[0100] The present disclosure also provides methods of treating a subject having nephronophthisis, the methods comprising administering one or more ALDH1L1 inhibitors, ALDOB inhibitors, G6PC inhibitors, LRP2 inhibitors, RPL3L inhibitors, SLC25A45 inhibitors, and/or SLC7A9 inhibitors, or any combination thereof, to the subject.

[0101] The present disclosure also provides methods of treating a subject having chronic interstitial nephritis, the methods comprising administering one or more ALDH1L1 inhibitors, ALDOB inhibitors, G6PC inhibitors, LRP2 inhibitors, RPL3L inhibitors, SLC25A45 inhibitors, and/or SLC7A9 inhibitors, or any combination thereof, to the subject.

[0102] The present disclosure also provides methods of treating a subject having nephrosclerosis, the methods comprising administering one or more ALDH1L1 inhibitors, ALDOB inhibitors, G6PC inhibitors, LRP2 inhibitors, RPL3L inhibitors, SLC25A45 inhibitors, and/or SLC7A9 inhibitors, or any combination thereof, to the subject.

[0103] The present disclosure also provides methods of preventing a subject from developing a kidney disease, the methods comprising administering one or more ALDH1L1 inhibitors, ALDOB inhibitors, G6PC inhibitors, LRP2 inhibitors, RPL3L inhibitors, SLC25A45 inhibitors, and/or SLC7A9 inhibitors, or any combination thereof, to the subject.

[0104] The present disclosure also provides methods of preventing a subject from developing chronic kidney disease, the methods comprising administering one or more ALDH1L1 inhibitors, ALDOB inhibitors, G6PC inhibitors, LRP2 inhibitors, RPL3L inhibitors, SLC25A45 inhibitors, and/or SLC7A9 inhibitors, or any combination thereof, to the subject.

[0105] The present disclosure also provides methods of preventing a subject from developing a kidney stone, the methods comprising administering one or more ALDH1L1 inhibitors, ALDOB inhibitors, G6PC inhibitors, LRP2 inhibitors, RPL3L inhibitors, SLC25A45 inhibitors, and/or SLC7A9 inhibitors, or any combination thereof, to the subject.

[0106] The present disclosure also provides methods of preventing a subject from developing chronic glomerulonephritis, the methods comprising administering one or more ALDH1L1 inhibitors, ALDOB inhibitors, G6PC inhibitors, LRP2 inhibitors, RPL3L inhibitors, SLC25A45 inhibitors, and/or SLC7A9 inhibitors, or any combination thereof, to the subject.

[0107] The present disclosure also provides methods of preventing a subject from developing nephrosis, the methods comprising administering one or more ALDH1L1 inhibitors, ALDOB inhibitors, G6PC inhibitors, LRP2 inhibitors, RPL3L inhibitors, SLC25A45 inhibitors, and/or SLC7A9 inhibitors, or any combination thereof, to the subject.

[0108] The present disclosure also provides methods of preventing a subject from developing nephronophthisis, the methods comprising administering one or more ALDH1L1 inhibitors, ALDOB inhibitors, G6PC inhibitors, LRP2 inhibitors, RPL3L inhibitors, SLC25A45 inhibitors, and/or SLC7A9 inhibitors, or any combination thereof, to the subject.

[0109] The present disclosure also provides methods of preventing a subject from developing chronic interstitial nephritis, the methods comprising administering one or more ALDH1L1 inhibitors, ALDOB inhibitors, G6PC inhibitors, LRP2 inhibitors, RPL3L inhibitors, SLC25A45 inhibitors, and/or SLC7A9 inhibitors, or any combination thereof, to the subject.

[0110] The present disclosure also provides methods of preventing a subject from developing nephrosclerosis, the methods comprising administering one or more ALDH1L1 inhibitors, ALDOB inhibitors, G6PC inhibitors, LRP2 inhibitors, RPL3L inhibitors, SLC25A45 inhibitors, and/or SLC7A9 inhibitors, or any combination thereof, to the subject.

[0111] In some embodiments, the ALDH1L1 inhibitor comprises an inhibitory nucleic acid molecule. Examples of inhibitory nucleic acid molecules include, but are not limited to, antisense nucleic acid molecules, small interfering RNAs (siRNAs), and short hairpin RNAs (shRNAs). Such inhibitory nucleic acid molecules can be designed to target any region of an ALDH1L1 nucleic acid molecule. In some embodiments, the antisense RNA, siRNA, or shRNA hybridizes to a sequence within an ALDH1L1 genomic nucleic acid molecule or mRNA molecule and decreases expression of the ALDH1L1 polypeptide in a cell in the subject. In some embodiments, the ALDH1L1 inhibitor comprises an antisense molecule that hybridizes to an ALDH1L1 genomic nucleic acid molecule or mRNA molecule and decreases expression of the ALDH1L1 polypeptide in a cell in the subject. In some embodiments, the ALDH1L1 inhibitor comprises an siRNA that hybridizes to an ALDH1L1 genomic nucleic acid molecule or mRNA molecule and decreases expression of the ALDH1L1 polypeptide in a cell in the subject. In some embodiments, the ALDH1L1 inhibitor comprises an shRNA that hybridizes to an ALDH1L1 genomic nucleic acid molecule or mRNA molecule and decreases expression of the ALDH1L1 polypeptide in a cell in the subject.

[0112] In some embodiments, the ALDOB inhibitor comprises an inhibitory nucleic acid molecule. Examples of inhibitory nucleic acid molecules include, but are not limited to, antisense nucleic acid molecules, siRNAs, and shRNAs. Such inhibitory nucleic acid molecules can be designed to target any region of an ALDOB nucleic acid molecule. In some embodiments, the antisense RNA, siRNA, or shRNA hybridizes to a sequence within an ALDOB genomic nucleic acid molecule or mRNA molecule and decreases expression of the ALDOB polypeptide in a cell in the subject. In some embodiments, the ALDOB inhibitor comprises an antisense molecule that hybridizes to an ALDOB genomic nucleic acid molecule or mRNA molecule and decreases expression of the ALDOB polypeptide in a cell in the subject. In some embodiments, the ALDOB inhibitor comprises an siRNA that hybridizes to an ALDOB genomic nucleic acid molecule or mRNA molecule and decreases expression of the ALDOB polypeptide in a cell in the subject. In some embodiments, the ALDOB inhibitor comprises an shRNA that hybridizes to an ALDOB genomic nucleic acid molecule or mRNA molecule and decreases expression of the ALDOB polypeptide in a cell in the subject.

[0113] In some embodiments, the G6PC inhibitor comprises an inhibitory nucleic acid molecule. Examples of inhibitory nucleic acid molecules include, but are not limited to, antisense nucleic acid molecules, siRNAs, and shRNAs. Such inhibitory nucleic acid molecules can be designed to target any region of a G6PC nucleic acid molecule. In some embodiments, the antisense RNA, siRNA, or shRNA hybridizes to a sequence within a G6PC genomic nucleic acid molecule or mRNA molecule and decreases expression of the G6PC polypeptide in a cell in the subject. In some embodiments, the G6PC inhibitor comprises an antisense molecule that hybridizes to a G6PC genomic nucleic acid molecule or mRNA molecule and decreases expression of the G6PC polypeptide in a cell in the subject. In some embodiments, the G6PC inhibitor comprises an siRNA that hybridizes to a G6PC genomic nucleic acid molecule or mRNA molecule and decreases expression of the G6PC polypeptide in a cell in the subject. In some embodiments, the G6PC inhibitor comprises an shRNA that hybridizes to a G6PC genomic nucleic acid molecule or mRNA molecule and decreases expression of the G6PC polypeptide in a cell in the subject.

[0114] In some embodiments, the LRP2 inhibitor comprises an inhibitory nucleic acid molecule. Examples of inhibitory nucleic acid molecules include, but are not limited to, antisense nucleic acid molecules, siRNAs, and shRNAs. Such inhibitory nucleic acid molecules can be designed to target any region of an LRP2 nucleic acid molecule. In some embodiments, the antisense RNA, siRNA, or shRNA hybridizes to a sequence within an LRP2 genomic nucleic acid molecule or mRNA molecule and decreases expression of the LRP2 polypeptide in a cell in the subject. In some embodiments, the LRP2 inhibitor comprises an antisense molecule that hybridizes to an LRP2 genomic nucleic acid molecule or mRNA molecule and decreases expression of the LRP2 polypeptide in a cell in the subject. In some embodiments, the LRP2 inhibitor comprises an siRNA that hybridizes to an LRP2 genomic nucleic acid molecule or mRNA molecule and decreases expression of the LRP2 polypeptide in a cell in the subject. In some embodiments, the LRP2 inhibitor comprises an shRNA that hybridizes to an LRP2 genomic nucleic acid molecule or mRNA molecule and decreases expression of the LRP2 polypeptide in a cell in the subject.

[0115] In some embodiments, the RPL3L inhibitor comprises an inhibitory nucleic acid molecule. Examples of inhibitory nucleic acid molecules include, but are not limited to, antisense nucleic acid molecules, siRNAs, and shRNAs. Such inhibitory nucleic acid molecules can be designed to target any region of an RPL3L nucleic acid molecule. In some embodiments, the antisense RNA, siRNA, or shRNA hybridizes to a sequence within an RPL3L genomic nucleic acid molecule or mRNA molecule and decreases expression of the RPL3L polypeptide in a cell in the subject. In some embodiments, the RPL3L inhibitor comprises an antisense molecule that hybridizes to an RPL3L genomic nucleic acid molecule or mRNA molecule and decreases expression of the RPL3L polypeptide in a cell in the subject. In some embodiments, the RPL3L inhibitor comprises an siRNA that hybridizes to an RPL3L genomic nucleic acid molecule or mRNA molecule and decreases expression of the RPL3L polypeptide in a cell in the subject. In some embodiments, the RPL3L inhibitor comprises an shRNA that hybridizes to an RPL3L genomic nucleic acid molecule or mRNA molecule and decreases expression of the RPL3L polypeptide in a cell in the subject.

[0116] In some embodiments, the SLC25A45 inhibitor comprises an inhibitory nucleic acid molecule. Examples of inhibitory nucleic acid molecules include, but are not limited to, antisense nucleic acid molecules, siRNAs, and shRNAs. Such inhibitory nucleic acid molecules can be designed to target any region of an SLC25A45 nucleic acid molecule. In some embodiments, the antisense RNA, siRNA, or shRNA hybridizes to a sequence within an SLC25A45 genomic nucleic acid molecule or mRNA molecule and decreases expression of the SLC25A45 polypeptide in a cell in the subject. In some embodiments, the SLC25A45 inhibitor comprises an antisense molecule that hybridizes to an SLC25A45 genomic nucleic acid molecule or mRNA molecule and decreases expression of the SLC25A45 polypeptide in a cell in the subject. In some embodiments, the SLC25A45 inhibitor comprises an siRNA that hybridizes to an SLC25A45 genomic nucleic acid molecule or mRNA molecule and decreases expression of the SLC25A45 polypeptide in a cell in the subject. In some embodiments, the SLC25A45 inhibitor comprises an shRNA that hybridizes to an SLC25A45 genomic nucleic acid molecule or mRNA molecule and decreases expression of the SLC25A45 polypeptide in a cell in the subject.

[0117] In some embodiments, the SLC7A9 inhibitor comprises an inhibitory nucleic acid molecule. Examples of inhibitory nucleic acid molecules include, but are not limited to, antisense nucleic acid molecules, siRNAs, and shRNAs. Such inhibitory nucleic acid molecules can be designed to target any region of an SLC7A9 nucleic acid molecule. In some embodiments, the antisense RNA, siRNA, or shRNA hybridizes to a sequence within an SLC7A9 genomic nucleic acid molecule or mRNA molecule and decreases expression of the SLC7A9 polypeptide in a cell in the subject. In some embodiments, the SLC7A9 inhibitor comprises an antisense molecule that hybridizes to an SLC7A9 genomic nucleic acid molecule or mRNA molecule and decreases expression of the SLC7A9 polypeptide in a cell in the subject. In some embodiments, the SLC7A9 inhibitor comprises an siRNA that hybridizes to an SLC7A9 genomic nucleic acid molecule or mRNA molecule and decreases expression of the SLC7A9 polypeptide in a cell in the subject. In some embodiments, the SLC7A9 inhibitor comprises an shRNA that hybridizes to an SLC7A9 genomic nucleic acid molecule or mRNA molecule and decreases expression of the SLC7A9 polypeptide in a cell in the subject.

[0118] The inhibitory nucleic acid molecules can comprise RNA, DNA, or both RNA and DNA. The inhibitory nucleic acid molecules can also be linked or fused to a heterologous nucleic acid sequence, such as in a vector, or a heterologous label. For example, the inhibitory nucleic acid molecules can be within a vector or as an exogenous donor sequence comprising the inhibitory nucleic acid molecule and a heterologous nucleic acid sequence. The inhibitory nucleic acid molecules can also be linked or fused to a heterologous label. The label can be directly detectable (such as, for example, fluorophore) or indirectly detectable (such as, for example, hapten, enzyme, or fluorophore quencher). Such labels can be detectable by spectroscopic, photochemical, biochemical, immunochemical, or chemical means. Such labels include, for example, radiolabels, pigments, dyes, chromogens, spin labels, and fluorescent labels. The label can also be, for example, a chemiluminescent substance; a metal-containing substance; or an enzyme, where there occurs an enzyme-dependent secondary generation of signal. The term “label” can also refer to a “tag” or hapten that can bind selectively to a conjugated molecule such that the conjugated molecule, when added subsequently along with a substrate, is used to generate a detectable signal. For example, biotin can be used as a tag along with an avidin or streptavidin conjugate of horseradish peroxidate (HRP) to bind to the tag, and examined using a calorimetric substrate (such as, for example, tetramethylbenzidine (TMB)) or a fluorogenic substrate to detect the presence of HRP. Exemplary labels that can be used as tags to facilitate purification include, but are not limited to, myc, HA, FLAG or 3×FLAG, 6×His or polyhistidine, glutathione-S-transferase (GST), maltose binding protein, an epitope tag, or the Fc portion of immunoglobulin. Numerous labels include, for example, particles, fluorophores, haptens, enzymes and their calorimetric, fluorogenic and chemiluminescent substrates and other labels.

[0119] The inhibitory nucleic acid molecules can comprise, for example, nucleotides or non-natural or modified nucleotides, such as nucleotide analogs or nucleotide substitutes. Such nucleotides include a nucleotide that contains a modified base, sugar, or phosphate group, or that incorporates a non-natural moiety in its structure. Examples of non-natural nucleotides include, but are not limited to, dideoxynucleotides, biotinylated, aminated, deaminated, alkylated, benzylated, and fluorophor-labeled nucleotides.

[0120] The inhibitory nucleic acid molecules can also comprise one or more nucleotide analogs or substitutions. A nucleotide analog is a nucleotide which contains a modification to either the base, sugar, or phosphate moieties. Modifications to the base moiety include, but are not limited to, natural and synthetic modifications of A, C, G, and T/U, as well as different purine or pyrimidine bases such as, for example, pseudouridine, uracil-5-yl, hypoxanthin-9-yl (1), and 2-aminoadenin-9-yl. Modified bases include, but are not limited to, 5-methylcytosine (5-me-C), 5-hydroxymethyl cytosine, xanthine, hypoxanthine, 2-aminoadenine, 6-methyl and other alkyl derivatives of adenine and guanine, 2-propyl and other alkyl derivatives of adenine and guanine, 2-thiouracil, 2-thiothymine and 2-thiocytosine, 5-halouracil and cytosine, 5-propynyl uracil and cytosine, 6-azo uracil, cytosine and thymine, 5-uracil (pseudouracil), 4-thiouracil, 8-halo, 8-amino, 8-thiol, 8-thioalkyl, 8-hydroxyl and other 8-substituted adenines and guanines, 5-halo (such as, for example, 5-bromo), 5-trifluoromethyl and other 5-substituted uracils and cytosines, 7-methylguanine, 7-methyladenine, 8-azaguanine, 8-azaadenine, 7-deazaguanine, 7-deazaadenine, 3-deazaguanine, and 3-deazaadenine.

[0121] Nucleotide analogs can also include modifications of the sugar moiety. Modifications to the sugar moiety include, but are not limited to, natural modifications of the ribose and deoxy ribose as well as synthetic modifications. Sugar modifications include, but are not limited to, the following modifications at the 2′ position: OH; F; O-, S-, or N-alkyl; O-, S-, or N-alkenyl; O-, S- or N-alkynyl; or O-alkyl-O-alkyl, wherein the alkyl, alkenyl, and alkynyl may be substituted or unsubstituted C₁₋₁₀alkyl or C₂₋₁₀alkenyl, and C₂₋₁₀alkynyl. Exemplary 2′ sugar modifications also include, but are not limited to, —O[(CH₂)ₙO]ₘCH₃, —O(CH₂)ₙOCH₃, —O(CH₂)ₙNH₂, —O(CH₂)ₙCH₃, —O(CH₂)ₙ—ONH₂, and —O(CH₂)ₙON[(CH₂)ₙCH₃)]₂, where n and m, independently, are from 1 to about 10. Other modifications at the 2′ position include, but are not limited to, C₁₋₁₀alkyl, substituted lower alkyl, alkaryl, aralkyl, O-alkaryl or O-aralkyl, SH, SCH₃, OCN, Cl, Br, CN, CF₃, OCF₃, SOCH₃, SO₂CH₃, ONO₂, NO₂, N₃, NH₂, heterocycloalkyl, heterocycloalkaryl, aminoalkylamino, polyalkylamino, substituted silyl, an RNA cleaving group, a reporter group, an intercalator, a group for improving the pharmacokinetic properties of an oligonucleotide, or a group for improving the pharmacodynamic properties of an oligonucleotide, and other substituents having similar properties. Similar modifications may also be made at other positions on the sugar, particularly the 3′ position of the sugar on the 3′ terminal nucleotide or in 2′-5′ linked oligonucleotides and the 5′ position of 5′ terminal nucleotide. Modified sugars can also include those that contain modifications at the bridging ring oxygen, such as CH₂ and S. Nucleotide sugar analogs can also have sugar mimetics, such as cyclobutyl moieties in place of the pentofuranosyl sugar.

[0122] Nucleotide analogs can also be modified at the phosphate moiety. Modified phosphate moieties include, but are not limited to, those that can be modified so that the linkage between two nucleotides contains a phosphorothioate, chiral phosphorothioate, phosphorodithioate, phosphotriester, aminoalkylphosphotriester, methyl and other alkyl phosphonates including 3′-alkylene phosphonate and chiral phosphonates, phosphinates, phosphoramidates including 3′-amino phosphoramidate and aminoalkylphosphoramidates, thionophosphoramidates, thionoalkylphosphonates, thionoalkylphosphotriesters, and boranophosphates. These phosphate or modified phosphate linkage between two nucleotides can be through a 3′-5′ linkage or a 2′-5′ linkage, and the linkage can contain inverted polarity such as 3′-5′ to 5′-3′ or 2′-5′ to 5′-2′. Various salts, mixed salts, and free acid forms are also included. Nucleotide substitutes also include peptide nucleic acids (PNAs).

[0123] In some embodiments, the antisense nucleic acid molecules are gapmers, whereby the first one to seven nucleotides at the 5′ and 3′ ends each have 2′-methoxyethyl (2′-MOE) modifications. In some embodiments, the first five nucleotides at the 5′ and 3′ ends each have 2′-MOE modifications. In some embodiments, the first one to seven nucleotides at the 5′ and 3′ ends are RNA nucleotides. In some embodiments, the first five nucleotides at the 5′ and 3′ ends are RNA nucleotides. In some embodiments, each of the backbone linkages between the nucleotides is a phosphorothioate linkage.

[0124] In some embodiments, the siRNA molecules have termini modifications. In some embodiments, the 5′ end of the antisense strand is phosphorylated. In some embodiments, 5′-phosphate analogs that cannot be hydrolyzed, such as 5′-(E)-vinyl-phosphonate are used.

[0125] In some embodiments, the siRNA molecules have backbone modifications. In some embodiments, the modified phosphodiester groups that link consecutive ribose nucleosides have been shown to enhance the stability and in vivo bioavailability of siRNAs The non-ester groups (—OH, ═O) of the phosphodiester linkage can be replaced with sulfur, boron, or acetate to give phosphorothioate, boranophosphate, and phosphonoacetate linkages. In addition, substituting the phosphodiester group with a phosphotriester can facilitate cellular uptake of siRNAs and retention on serum components by eliminating their negative charge. In some embodiments, the siRNA molecules have sugar modifications. In some embodiments, the sugars are deprotonated (reaction catalyzed by exo- and endonucleases) whereby the 2′-hydroxyl can act as a nucleophile and attack the adjacent phosphorous in the phosphodiester bond. Such alternatives include 2′-O-methyl, 2′-O-methoxyethyl, and 2′-fluoro modifications.

[0126] In some embodiments, the siRNA molecules have base modifications. In some embodiments, the bases can be substituted with modified bases such as pseudouridine, 5′-methylcytidine, N6-methyladenosine, inosine, and N7-methylguanosine.

[0127] In some embodiments, the siRNA molecules are conjugated to lipids. Lipids can be conjugated to the 5′ or 3′ termini of siRNA to improve their in vivo bioavailability by allowing them to associate with serum lipoproteins. Representative lipids include, but are not limited to, cholesterol and vitamin E, and fatty acids, such as palmitate and tocopherol.

[0128] In some embodiments, a representative siRNA has the following formula:

Sense: mN*mN*/i2FN/mN/i2FN/mN/i2FN/mN/i2FN/mN/i2FN/mN/i2FN/mN/i2FN/mN/i2FN/*mN*/32FN/

### Antisense: /52FN/*/i2FN/*mN/i2FN/mN/i2FN/mN/i2FN/mN/i2FN/mN/i2FN/mN/i2FN/mN/i2FN/mN/i2FN/mN*N*N

[0129] wherein: “N” is the base; “2F” is a 2′-F modification; “m” is a 2′-O-methyl modification, “I” is an internal base; and “*” is a phosphorothioate backbone linkage.

[0130] In any of the embodiments described herein, the inhibitory nucleic acid molecules may be administered, for example, as one to two hour i.v. infusions or s.c. injections. In any of the embodiments described herein, the inhibitory nucleic acid molecules may be administered at dose levels that range from about 50 mg to about 900 mg, from about 100 mg to about 800 mg, from about 150 mg to about 700 mg, or from about 175 to about 640 mg (2.5 to 9.14 mg/kg; 92.5 to 338 mg/m²—based on an assumption of a body weight of 70 kg and a conversion of mg/kg to mg/m² dose levels based on a mg/kg dose multiplier value of 37 for humans).

[0131] The present disclosure also provides vectors comprising any one or more of the inhibitory nucleic acid molecules. In some embodiments, the vectors comprise any one or more of the inhibitory nucleic acid molecules and a heterologous nucleic acid. The vectors can be viral or nonviral vectors capable of transporting a nucleic acid molecule. In some embodiments, the vector is a plasmid or cosmid (such as, for example, a circular double-stranded DNA into which additional DNA segments can be ligated). In some embodiments, the vector is a viral vector, wherein additional DNA segments can be ligated into the viral genome. Expression vectors include, but are not limited to, plasmids, cosmids, retroviruses, adenoviruses, adeno-associated viruses (AAV), plant viruses such as cauliflower mosaic virus and tobacco mosaic virus, yeast artificial chromosomes (YACs), Epstein-Barr (EBV)-derived episomes, and other expression vectors known in the art.

[0132] The present disclosure also provides compositions comprising any one or more of the inhibitory nucleic acid molecules. In some embodiments, the composition is a pharmaceutical composition. In some embodiments, the compositions comprise a carrier and/or excipient. Examples of carriers include, but are not limited to, poly(lactic acid) (PLA) microspheres, poly(D,L-lactic-coglycolic-acid) (PLGA) microspheres, liposomes, micelles, inverse micelles, lipid cochleates, and lipid microtubules. A carrier may comprise a buffered salt solution such as PBS, HBSS, etc.

[0133] In some embodiments, the ALDH1L1 inhibitor comprises a nuclease agent that induces one or more nicks or double-strand breaks at a recognition sequence(s) or a DNA-binding protein that binds to a recognition sequence within an ALDH1L1 genomic nucleic acid molecule. The recognition sequence can be located within a coding region of the ALDH1L1 gene, or within regulatory regions that influence the expression of the gene. A recognition sequence of the DNA-binding protein or nuclease agent can be located in an intron, an exon, a promoter, an enhancer, a regulatory region, or any non-protein coding region. The recognition sequence can include or be proximate to the start codon of the ALDH1L1 gene. For example, the recognition sequence can be located about 10, about 20, about 30, about 40, about 50, about 100, about 200, about 300, about 400, about 500, or about 1,000 nucleotides from the start codon. As another example, two or more nuclease agents can be used, each targeting a nuclease recognition sequence including or proximate to the start codon. As another example, two nuclease agents can be used, one targeting a nuclease recognition sequence including or proximate to the start codon, and one targeting a nuclease recognition sequence including or proximate to the stop codon, wherein cleavage by the nuclease agents can result in deletion of the coding region between the two nuclease recognition sequences. Any nuclease agent that induces a nick or double-strand break into a desired recognition sequence can be used in the methods and compositions disclosed herein. Any DNA-binding protein that binds to a desired recognition sequence can be used in the methods and compositions disclosed herein.

[0134] In some embodiments, the ALDOB inhibitor comprises a nuclease agent that induces one or more nicks or double-strand breaks at a recognition sequence(s) or a DNA-binding protein that binds to a recognition sequence within an ALDOB genomic nucleic acid molecule. The recognition sequence can be located within a coding region of the ALDOB gene, or within regulatory regions that influence the expression of the gene. A recognition sequence of the DNA-binding protein or nuclease agent can be located in an intron, an exon, a promoter, an enhancer, a regulatory region, or any non-protein coding region. The recognition sequence can include or be proximate to the start codon of the ALDOB gene. For example, the recognition sequence can be located about 10, about 20, about 30, about 40, about 50, about 100, about 200, about 300, about 400, about 500, or about 1,000 nucleotides from the start codon. As another example, two or more nuclease agents can be used, each targeting a nuclease recognition sequence including or proximate to the start codon. As another example, two nuclease agents can be used, one targeting a nuclease recognition sequence including or proximate to the start codon, and one targeting a nuclease recognition sequence including or proximate to the stop codon, wherein cleavage by the nuclease agents can result in deletion of the coding region between the two nuclease recognition sequences. Any nuclease agent that induces a nick or double-strand break into a desired recognition sequence can be used in the methods and compositions disclosed herein. Any DNA-binding protein that binds to a desired recognition sequence can be used in the methods and compositions disclosed herein.

[0135] In some embodiments, the G6PC inhibitor comprises a nuclease agent that induces one or more nicks or double-strand breaks at a recognition sequence(s) or a DNA-binding protein that binds to a recognition sequence within a G6PC genomic nucleic acid molecule. The recognition sequence can be located within a coding region of the G6PC gene, or within regulatory regions that influence the expression of the gene. A recognition sequence of the DNA-binding protein or nuclease agent can be located in an intron, an exon, a promoter, an enhancer, a regulatory region, or any non-protein coding region. The recognition sequence can include or be proximate to the start codon of the G6PC gene. For example, the recognition sequence can be located about 10, about 20, about 30, about 40, about 50, about 100, about 200, about 300, about 400, about 500, or about 1,000 nucleotides from the start codon. As another example, two or more nuclease agents can be used, each targeting a nuclease recognition sequence including or proximate to the start codon. As another example, two nuclease agents can be used, one targeting a nuclease recognition sequence including or proximate to the start codon, and one targeting a nuclease recognition sequence including or proximate to the stop codon, wherein cleavage by the nuclease agents can result in deletion of the coding region between the two nuclease recognition sequences. Any nuclease agent that induces a nick or double-strand break into a desired recognition sequence can be used in the methods and compositions disclosed herein. Any DNA-binding protein that binds to a desired recognition sequence can be used in the methods and compositions disclosed herein.

[0136] In some embodiments, the LRP2 inhibitor comprises a nuclease agent that induces one or more nicks or double-strand breaks at a recognition sequence(s) or a DNA-binding protein that binds to a recognition sequence within an LRP2 genomic nucleic acid molecule. The recognition sequence can be located within a coding region of the LRP2 gene, or within regulatory regions that influence the expression of the gene. A recognition sequence of the DNA-binding protein or nuclease agent can be located in an intron, an exon, a promoter, an enhancer, a regulatory region, or any non-protein coding region. The recognition sequence can include or be proximate to the start codon of the LRP2 gene. For example, the recognition sequence can be located about 10, about 20, about 30, about 40, about 50, about 100, about 200, about 300, about 400, about 500, or about 1,000 nucleotides from the start codon. As another example, two or more nuclease agents can be used, each targeting a nuclease recognition sequence including or proximate to the start codon. As another example, two nuclease agents can be used, one targeting a nuclease recognition sequence including or proximate to the start codon, and one targeting a nuclease recognition sequence including or proximate to the stop codon, wherein cleavage by the nuclease agents can result in deletion of the coding region between the two nuclease recognition sequences. Any nuclease agent that induces a nick or double-strand break into a desired recognition sequence can be used in the methods and compositions disclosed herein. Any DNA-binding protein that binds to a desired recognition sequence can be used in the methods and compositions disclosed herein.

[0137] In some embodiments, the RPL3L inhibitor comprises a nuclease agent that induces one or more nicks or double-strand breaks at a recognition sequence(s) or a DNA-binding protein that binds to a recognition sequence within an RPL3L genomic nucleic acid molecule. The recognition sequence can be located within a coding region of the RPL3L gene, or within regulatory regions that influence the expression of the gene. A recognition sequence of the DNA-binding protein or nuclease agent can be located in an intron, an exon, a promoter, an enhancer, a regulatory region, or any non-protein coding region. The recognition sequence can include or be proximate to the start codon of the RPL3L gene. For example, the recognition sequence can be located about 10, about 20, about 30, about 40, about 50, about 100, about 200, about 300, about 400, about 500, or about 1,000 nucleotides from the start codon. As another example, two or more nuclease agents can be used, each targeting a nuclease recognition sequence including or proximate to the start codon. As another example, two nuclease agents can be used, one targeting a nuclease recognition sequence including or proximate to the start codon, and one targeting a nuclease recognition sequence including or proximate to the stop codon, wherein cleavage by the nuclease agents can result in deletion of the coding region between the two nuclease recognition sequences. Any nuclease agent that induces a nick or double-strand break into a desired recognition sequence can be used in the methods and compositions disclosed herein. Any DNA-binding protein that binds to a desired recognition sequence can be used in the methods and compositions disclosed herein.

[0138] In some embodiments, the SLC25A45 inhibitor comprises a nuclease agent that induces one or more nicks or double-strand breaks at a recognition sequence(s) or a DNA-binding protein that binds to a recognition sequence within an SLC25A45 genomic nucleic acid molecule. The recognition sequence can be located within a coding region of the SLC25A45 gene, or within regulatory regions that influence the expression of the gene. A recognition sequence of the DNA-binding protein or nuclease agent can be located in an intron, an exon, a promoter, an enhancer, a regulatory region, or any non-protein coding region. The recognition sequence can include or be proximate to the start codon of the SLC25A45 gene. For example, the recognition sequence can be located about 10, about 20, about 30, about 40, about 50, about 100, about 200, about 300, about 400, about 500, or about 1,000 nucleotides from the start codon. As another example, two or more nuclease agents can be used, each targeting a nuclease recognition sequence including or proximate to the start codon. As another example, two nuclease agents can be used, one targeting a nuclease recognition sequence including or proximate to the start codon, and one targeting a nuclease recognition sequence including or proximate to the stop codon, wherein cleavage by the nuclease agents can result in deletion of the coding region between the two nuclease recognition sequences. Any nuclease agent that induces a nick or double-strand break into a desired recognition sequence can be used in the methods and compositions disclosed herein. Any DNA-binding protein that binds to a desired recognition sequence can be used in the methods and compositions disclosed herein.

[0139] In some embodiments, the SLC7A9 inhibitor comprises a nuclease agent that induces one or more nicks or double-strand breaks at a recognition sequence(s) or a DNA-binding protein that binds to a recognition sequence within an SLC7A9 genomic nucleic acid molecule. The recognition sequence can be located within a coding region of the SLC7A9 gene, or within regulatory regions that influence the expression of the gene. A recognition sequence of the DNA-binding protein or nuclease agent can be located in an intron, an exon, a promoter, an enhancer, a regulatory region, or any non-protein coding region. The recognition sequence can include or be proximate to the start codon of the SLC7A9 gene. For example, the recognition sequence can be located about 10, about 20, about 30, about 40, about 50, about 100, about 200, about 300, about 400, about 500, or about 1,000 nucleotides from the start codon. As another example, two or more nuclease agents can be used, each targeting a nuclease recognition sequence including or proximate to the start codon. As another example, two nuclease agents can be used, one targeting a nuclease recognition sequence including or proximate to the start codon, and one targeting a nuclease recognition sequence including or proximate to the stop codon, wherein cleavage by the nuclease agents can result in deletion of the coding region between the two nuclease recognition sequences. Any nuclease agent that induces a nick or double-strand break into a desired recognition sequence can be used in the methods and compositions disclosed herein. Any DNA-binding protein that binds to a desired recognition sequence can be used in the methods and compositions disclosed herein.

[0140] Suitable nuclease agents and DNA-binding proteins for use herein include, but are not limited to, zinc finger protein or zinc finger nuclease (ZFN) pair, Transcription Activator-Like Effector (TALE) protein or Transcription Activator-Like Effector Nuclease (TALEN), or Clustered Regularly Interspersed Short Palindromic Repeats (CRISPR)/CRISPR-associated (Cas) systems. The length of the recognition sequence can vary, and includes, for example, recognition sequences that are about 30-36 bp for a zinc finger protein or ZFN pair, about 15-18 bp for each ZFN, about 36 bp for a TALE protein or TALEN, and about 20 bp for a CRISPR/Cas guide RNA.

[0141] In some embodiments, CRISPR/Cas systems can be used to modify one or more of ALDH1L1, ALDOB, G6PC, LRP2, RPL3L, SLC25A45, and/or SLC7A9 genomic nucleic acid molecules within a cell. The methods and compositions disclosed herein can employ CRISPR-Cas systems by utilizing CRISPR complexes (comprising a guide RNA (gRNA) complexed with a Cas protein) for site-directed cleavage of any one of ALDH1L1, ALDOB, G6PC, LRP2, RPL3L, SLC25A45, and/or SLC7A9 nucleic acid molecules.

[0142] Cas proteins generally comprise at least one RNA recognition or binding domain that can interact with gRNAs. Cas proteins can also comprise nuclease domains (such as, for example, DNase or RNase domains), DNA binding domains, helicase domains, protein-protein interaction domains, dimerization domains, and other domains. Suitable Cas proteins include, for example, a wild type Cas9 protein and a wild type Cpf1 protein (such as, for example, FnCpf1). A Cas protein can have full cleavage activity to create a double-strand break in any one of ALDH1L1, ALDOB, G6PC, LRP2, RPL3L, SLC25A45, or SLC7A9 genomic nucleic acid molecules or it can be a nickase that creates a single-strand break in any one of ALDH1L1, ALDOB, G6PC, LRP2, RPL3L, SLC25A45, or SLC7A9 genomic nucleic acid molecules. Additional examples of Cas proteins include, but are not limited to, Cas1, Cas1B, Cas2, Cas3, Cas4, Cas5, Cas5e (CasD), Cas6, Cas6e, Cas6f, Cas7, Cas8a1, Cas8a2, Cas8b, Cas8c, Cas9 (Csn1 or Csx12), Cas10, Cas10d, CasF, CasG, CasH, Csy1, Csy2, Csy3, Cse1 (CasA), Cse2 (CasB), Cse3 (CasE), Cse4 (CasC), Csc1, Csc2, Csa5, Csn2, Csm2, Csm3, Csm4, Csm5, Csm6, Cmr1, Cmr3, Cmr4, Cmr5, Cmr6, Csb1, Csb2, Csb3, Csx17, Csx14, Csx10, Csx16, CsaX, Csx3, Csx1, Csx15, Csf1, Csf2, Csf3, Csf4, and Cu1966, and homologs or modified versions thereof. Cas proteins can also be operably linked to heterologous polypeptides as fusion proteins. For example, a Cas protein can be fused to a cleavage domain, an epigenetic modification domain, a transcriptional activation domain, or a transcriptional repressor domain. Cas proteins can be provided in any form. For example, a Cas protein can be provided in the form of a protein, such as a Cas protein complexed with a gRNA. Alternately, a Cas protein can be provided in the form of a nucleic acid molecule encoding the Cas protein, such as an RNA or DNA.

[0143] In some embodiments, targeted genetic modifications of one or more of ALDH1L1, ALDOB, G6PC, LRP2, RPL3L, SLC25A45, and/or SLC7A9 genomic nucleic acid molecules can be generated by contacting a cell with a Cas protein and one or more gRNAs that hybridize to one or more gRNA recognition sequences within a target genomic locus in the one or more of ALDH1L1, ALDOB, G6PC, LRP2, RPL3L, SLC25A45, and/or SLC7A9 genomic nucleic acid molecules. For example, when targeting ALDH1L1, a gRNA recognition sequence can be located within a region of SEQ ID NO:1. The gRNA recognition sequence can include or be proximate to the start codon of an ALDH1L1 genomic nucleic acid molecule or the stop codon of an ALDH1L1 genomic nucleic acid molecule. For example, the gRNA recognition sequence can be located from about 10, from about 20, from about 30, from about 40, from about 50, from about 100, from about 200, from about 300, from about 400, from about 500, or from about 1,000 nucleotides of the start codon or the stop codon. For example, when targeting ALDOB, a gRNA recognition sequence can be located within a region of SEQ ID NO:73. The gRNA recognition sequence can include or be proximate to the start codon of an ALDOB genomic nucleic acid molecule or the stop codon of an ALDOB genomic nucleic acid molecule. For example, the gRNA recognition sequence can be located from about 10, from about 20, from about 30, from about 40, from about 50, from about 100, from about 200, from about 300, from about 400, from about 500, or from about 1,000 nucleotides of the start codon or the stop codon. For example, when targeting G6PC, a gRNA recognition sequence can be located within a region of SEQ ID NO:102. The gRNA recognition sequence can include or be proximate to the start codon of a G6PC genomic nucleic acid molecule or the stop codon of a G6PC genomic nucleic acid molecule. For example, the gRNA recognition sequence can be located from about 10, from about 20, from about 30, from about 40, from about 50, from about 100, from about 200, from about 300, from about 400, from about 500, or from about 1,000 nucleotides of the start codon or the stop codon. For example, when targeting LRP2, a gRNA recognition sequence can be located within a region of SEQ ID NO:120. The gRNA recognition sequence can include or be proximate to the start codon of an LRP2 genomic nucleic acid molecule or the stop codon of an LRP2 genomic nucleic acid molecule. For example, the gRNA recognition sequence can be located from about 10, from about 20, from about 30, from about 40, from about 50, from about 100, from about 200, from about 300, from about 400, from about 500, or from about 1,000 nucleotides of the start codon or the stop codon. For example, when targeting RPL3L, a gRNA recognition sequence can be located within a region of SEQ ID NO:144. The gRNA recognition sequence can include or be proximate to the start codon of an RPL3L genomic nucleic acid molecule or the stop codon of an RPL3L genomic nucleic acid molecule. For example, the gRNA recognition sequence can be located from about 10, from about 20, from about 30, from about 40, from about 50, from about 100, from about 200, from about 300, from about 400, from about 500, or from about 1,000 nucleotides of the start codon or the stop codon. For example, when targeting SLC25A45, a gRNA recognition sequence can be located within a region of SEQ ID NO:159. The gRNA recognition sequence can include or be proximate to the start codon of an SLC25A45 genomic nucleic acid molecule or the stop codon of an SLC25A45 genomic nucleic acid molecule. For example, the gRNA recognition sequence can be located from about 10, from about 20, from about 30, from about 40, from about 50, from about 100, from about 200, from about 300, from about 400, from about 500, or from about 1,000 nucleotides of the start codon or the stop codon. For example, when targeting SLC7A9, a gRNA recognition sequence can be located within a region of SEQ ID NO:205. The gRNA recognition sequence can include or be proximate to the start codon of an SLC7A9 genomic nucleic acid molecule or the stop codon of an SLC7A9 genomic nucleic acid molecule. For example, the gRNA recognition sequence can be located from about 10, from about 20, from about 30, from about 40, from about 50, from about 100, from about 200, from about 300, from about 400, from about 500, or from about 1,000 nucleotides of the start codon or the stop codon.

[0144] The gRNA recognition sequences within a target genomic locus in ALDH1L1, ALDOB, G6PC, LRP2, RPL3L, SLC25A45, or SLC7A9 genomic nucleic acid molecule are located near a Protospacer Adjacent Motif (PAM) sequence, which is a 2-6 base pair DNA sequence immediately following the DNA sequence targeted by the Cas9 nuclease. The canonical PAM is the sequence 5′-NGG-3′ where “N” is any nucleobase followed by two guanine (“G”) nucleobases. gRNAs can transport Cas9 to anywhere in the genome for gene editing, but no editing can occur at any site other than one at which Cas9 recognizes PAM. In addition, 5′-NGA-3′ can be a highly efficient non-canonical PAM for human cells. Generally, the PAM is about 2-6 nucleotides downstream of the DNA sequence targeted by the gRNA. The PAM can flank the gRNA recognition sequence. In some embodiments, the gRNA recognition sequence can be flanked on the 3′ end by the PAM. In some embodiments, the gRNA recognition sequence can be flanked on the 5′ end by the PAM. For example, the cleavage site of Cas proteins can be about 1 to about 10, about 2 to about 5 base pairs, or three base pairs upstream or downstream of the PAM sequence. In some embodiments (such as when Cas9 from S. pyogenes or a closely related Cas9 is used), the PAM sequence of the non-complementary strand can be 5′-NGG-3′, where N is any DNA nucleotide and is immediately 3′ of the gRNA recognition sequence of the non-complementary strand of the target DNA. As such, the PAM sequence of the complementary strand would be 5′-CCN-3′, where N is any DNA nucleotide and is immediately 5′ of the gRNA recognition sequence of the complementary strand of the target DNA.

[0145] A gRNA is an RNA molecule that binds to a Cas protein and targets the Cas protein to a specific location within ALDH1L1, ALDOB, G6PC, LRP2, RPL3L, SLC25A45, or SLC7A9 genomic nucleic acid molecule. An exemplary gRNA is a gRNA effective to direct a Cas enzyme to bind to or cleave ALDH1L1, ALDOB, G6PC, LRP2, RPL3L, SLC25A45, or SLC7A9 genomic nucleic acid molecule, wherein the gRNA comprises a DNA-targeting segment that hybridizes to a gRNA recognition sequence within the ALDH1L1, ALDOB, G6PC, LRP2, RPL3L, SLC25A45, or SLC7A9 genomic nucleic acid molecule. Exemplary gRNAs comprise a DNA-targeting segment that hybridizes to a gRNA recognition sequence present within ALDH1L1, ALDOB, G6PC, LRP2, RPL3L, SLC25A45, or SLC7A9 genomic nucleic acid molecule that includes or is proximate to the start codon or the stop codon. For example, a gRNA can be selected such that it hybridizes to a gRNA recognition sequence that is located from about 5, from about 10, from about 15, from about 20, from about 25, from about 30, from about 35, from about 40, from about 45, from about 50, from about 100, from about 200, from about 300, from about 400, from about 500, or from about 1,000 nucleotides of the start codon or located from about 5, from about 10, from about 15, from about 20, from about 25, from about 30, from about 35, from about 40, from about 45, from about 50, from about 100, from about 200, from about 300, from about 400, from about 500, or from about 1,000 nucleotides of the stop codon. Suitable gRNAs can comprise from about 17 to about 25 nucleotides, from about 17 to about 23 nucleotides, from about 18 to about 22 nucleotides, or from about 19 to about 21 nucleotides. In some embodiments, the gRNAs can comprise 20 nucleotides.

[0146] Examples of suitable gRNA recognition sequences located within the human ALDH1L1 reference gene are set forth in Table 1 as SEQ ID NOs:229-248.

TABLE 1
Guide RNA Recognition Sequences
Near ALDH1L1 Variation(s)

| Strand | gRNA Recognition Sequence | SEQ ID NO: |
|---|---|---|
| + | TCTGGATGGACATGCCCACG | 229 |
| − | CGGTATTCAAGTACTCCCGG | 230 |
| − | CTGGCCCTGAAGACCCACGT | 231 |
| − | ACTGCTCCCTAGGCACCGAG | 232 |
| + | CTGGATGGACATGCCCACGT | 233 |
| + | TCATCAGGGGATAGTTCCAG | 234 |
| + | GGGCACTGATTATCTCCATG | 235 |
| − | ATGCCTTTGAGAATGGACGG | 236 |
| − | CCAAGTCACCGACGTCGACA | 237 |
| + | CCGGCACCTTGTCGTTCCCG | 238 |
| + | GGTGGGATTGATGGTCTCAG | 239 |
| + | CCAGCCAGCAAAGTAGCGGA | 240 |
| − | GGTGGGGGAAGATCAGTGCG | 241 |
| + | CCTCACAACGTCCACAGACG | 242 |
| − | CTGGATCCGCGGGAACGACA | 243 |
| − | AGGAAGGAGCCACCTATGAG | 244 |
| + | GCACTCACACTTCCATCGGT | 245 |
| + | GCCCTCAGCGATCAGCCTCA | 246 |
| + | TGCCCCCTTAAAGAAGTTCG | 247 |
| − | CTGCGAGGGGACGATGAGGA | 248 |

[0147] Examples of suitable gRNA recognition sequences located within the human ALDOB reference gene are set forth in Table 2 as SEQ ID NOs:249-268.

TABLE 2
Guide RNA Recognition Sequences
Near ALDOB Variation(s)

| Strand | gRNA Recognition Sequence | SEQ ID NO: |
|---|---|---|
| + | GCACCTCCTTGGTCTAACTG | 249 |
| − | TTGTATCCACAGTTAGACCA | 250 |
| − | TCCATCAACCAGAGCATCGG | 251 |
| − | CTCCCACCATAGGTACCATG | 252 |
| − | TATCCACAGTTAGACCAAGG | 253 |
| − | GGTACCTATTGTTGAACCAG | 254 |
| − | AAGGAAAAGGGGATCGTGGT | 255 |
| − | AAAACACTGAAGAGAACCGC | 256 |
| + | TAGCGAGGCTGGATGGACAC | 257 |
| − | TTCCATCAACCAGAGCATCG | 258 |
| − | CCACGAGACCCTCTACCAGA | 259 |
| + | GAGGCTGGATGGACACTGGT | 260 |
| − | CTCTACCAGAAGGACAGCCA | 261 |
| + | AATATCCTTACCTTGAATGG | 262 |
| + | GGATTTCTCGGAACTGCCGG | 263 |
| + | ACTGAGCACAGCGCTCTGAG | 264 |
| − | CCTCCCACCATAGGTACCAT | 265 |
| − | CACCCTGCTAAAGCCCAACA | 266 |
| − | CTGCCAGTATGTTACTGAGA | 267 |
| + | GGGCCTTGTAGACAGCAGCC | 268 |

[0148] Examples of suitable gRNA recognition sequences located within the human G6PC reference gene are set forth in Table 3 as SEQ ID NOs:269-288.

TABLE 3
Guide RNA Recognition Sequences
Near G6PC Variation(s)

| Strand | gRNA Recognition Sequence | SEQ ID NO: |
|---|---|---|
| − | CTCCAATCACAGCTACCCAA | 269 |
| − | GTTCTTACCACTTAAAGACG | 270 |
| + | AGCAGGTGTATACTACGTGA | 271 |
| − | ACAGGGAACTGCTTTATCAG | 272 |
| − | ACTCCAGCAACAACTTGATG | 273 |
| + | TGGACAGCGTCCATACTGGT | 274 |
| − | GAGCAGCAGATAAAATCCGA | 275 |
| − | GAGTTCTTACCGAAATCTGT | 276 |
| + | CCAGTCAACACATTACCTCC | 277 |
| + | GTAACCTGTGAGACTGGACC | 278 |
| − | TCTTACCGAAATCTGTAGGT | 279 |
| − | GGACGTAGAAGGCATTCCTG | 280 |
| + | ATTACCAAGACTCCCAGGAC | 281 |
| − | CAGATCAGCCCATACCTGAC | 282 |
| + | TTGGACAGCGTCCATACTGG | 283 |
| − | GCTGTCCAAAGAGAATCCTA | 284 |
| − | GTATCCAAAACCCACCAGTA | 285 |
| + | TTCCTGTTCAGCTTCGCCAT | 286 |
| + | TCTTTGGACAGCGTCCATAC | 287 |
| − | GGCTGGCATTATAGATGCTG | 288 |

[0149] Examples of suitable gRNA recognition sequences located within the human LRP2 reference gene are set forth in Table 4 as SEQ ID NOs:289-308.

TABLE 4
Guide RNA Recognition Sequences
Near LRP2 Variation(s)

| Strand | gRNA Recognition Sequence | SEQ ID NO: |
|---|---|---|
| − | GGTGACTATAGCGACGAGAG | 289 |
| + | GCATAACCCGACGAGTAGCA | 290 |
| + | GATGAACTACCACCGACCGT | 291 |
| + | CCATTGCAGATAAACTCACG | 292 |
| + | CCGTCACACAAATAAACGCG | 293 |
| + | CACCATCACAGACAAACGAT | 294 |
| − | GCATCCTAGAGGAATTGCCG | 295 |
| − | GAAATGACAGTTATCCGAAG | 296 |
| + | CCATCACAGACCCAAGACTG | 297 |
| − | TCCTAGAACTCAGTCAATCG | 298 |
| − | TGACAAACGCAACGACTGTG | 299 |
| + | AATAAACGTAGCCATCACTT | 300 |
| − | AAAAACCTAACAAATCCAAG | 301 |
| + | CTGTTCGATTGGTACAGTCA | 302 |
| − | CAGCACTGTTACAATATGAG | 303 |
| − | GGGTTATGCGAGCCAACAAG | 304 |
| + | ATTGCACATAAACTCCGTGG | 305 |
| + | GAACATTTATGAACATCATG | 306 |
| + | CATGGACTGCAATTCCCCAG | 307 |
| + | GAACGCGGGCTATCACAGTG | 308 |

[0150] Examples of suitable gRNA recognition sequences located within the human RPL3L reference gene are set forth in Table 5 as SEQ ID NOs:309-328.

TABLE 5
Guide RNA Recognition Sequences
Near RPL3L Variation(s)

| Strand | gRNA Recognition Sequence | SEQ ID NO: |
|---|---|---|
| − | TGTAGAAACGCCGCCCCTAG | 309 |
| + | GGCGCCGGCACTCATCACTG | 310 |
| − | AGAAACGCCGCCCCTAGTGG | 311 |
| + | AGGCCCTTATGGGTCTTCCG | 312 |
| − | TCCAGAAATTTCCAAACGGG | 313 |
| − | ATGGAGATCCAGCTGAACGG | 314 |
| − | CCATAAGGGCCTGCGCAAGG | 315 |
| + | AGTCCTTGTAGAATCGGCGC | 316 |
| + | ACCACGCCCACCACCACTAG | 317 |
| + | GCAGCTTCTTGGTATGCCAG | 318 |
| + | AACTGTGACTCACTGAGCCC | 319 |
| − | GGCGCCGATTCTACAAGGAC | 320 |
| − | GTGCCGGCGCCGATTCTACA | 321 |
| − | GGCATACCAAGAAGCTGCCG | 322 |
| + | TGAAGCTCCGGAGACCTCGA | 323 |
| − | ACCAAGGGTCGAGGCGTCAA | 324 |
| − | AAGAGGTGGCGGGACACAGA | 325 |
| + | TGACATCAATGACCTCACTC | 326 |
| + | TGTAGCCCAGGAAGGCCGTG | 327 |
| − | TGCCCCATAAGAGGAGCCAC | 328 |

[0151] Examples of suitable gRNA recognition sequences located within the human SLC25A45 reference gene are set forth in Table 6 as SEQ ID NOs:329-348.

TABLE 6
Guide RNA Recognition Sequences
Near SLC25A45 Variation(s)

| Strand | gRNA Recognition Sequence | SEQ ID NO: |
|---|---|---|
| − | CAGACCCAGACCACCTACCG | 329 |
| + | TGAAGTAGATCCCCACCGTG | 330 |
| + | GGCCACTCACGGACTCATGG | 331 |
| + | ATGAAGTAGATCCCCACCGT | 332 |
| + | ATCAACGATGCCCCGGTAGG | 333 |
| + | GCAATCAACGATGCCCCGGT | 334 |
| + | GATGAAGTAGATCCCCACCG | 335 |
| + | TGTTGCTATAGACCCCAAAC | 336 |
| + | GTGGGCCACTCACGGACTCA | 337 |
| + | GAAGTAGATCCCCACCGTGG | 338 |
| − | TACATGCACATCTTCCTAGC | 339 |
| + | TTTGTAGCCGGACTTTGATG | 340 |
| − | TGAGGGACACCCCCACGGTG | 341 |
| − | TCTACTTCATCACCTATGAA | 342 |
| − | ACACCCGTTTGACACTGTAA | 343 |
| + | CAGTGTCAAACGGGTGTCCC | 344 |
| + | GCTCCTCGGAACAGCCCCCG | 345 |
| − | GCCCCCCACCCCGGTACCAG | 346 |
| + | TCATTCCCTTGAAGAAGCCC | 347 |
| + | GGCCCGCCGCTCCTGGTGGG | 348 |

[0152] Examples of suitable gRNA recognition sequences located within the human SLC7A9 reference gene are set forth in Table 6 as SEQ ID NOs:349-368.

TABLE 7
Guide RNA Recognition Sequences
Near SLC7A9 Variation(s)

| Strand | gRNA Recognition Sequence | SEQ ID NO: |
|---|---|---|
| + | ATGTAGCACGCCGTCACCAG | 349 |
| + | TGAAGTAGGACACGTTCATG | 350 |
| + | GAAGGGCGCACACACATACT | 351 |
| − | GCCCTGCCTCATCATATGGG | 352 |
| − | GCACAATGATCACCAAGTCA | 353 |
| + | CATTTCACAACGATTTGAGG | 354 |
| + | CGCAAGCCGCCCATATGATG | 355 |
| + | TTCACTGTCGAGATGAACAC | 356 |
| − | CATTATCATCGGGATCCCCC | 357 |
| + | GGTCCCGTTAGCAGCACCGA | 358 |
| − | TCAGCAACACGGAAGCTGTG | 359 |
| − | CAGTGAACTCACTGAGCGTG | 360 |
| − | AGAGTATCCCTACCTGATGG | 361 |
| − | ACAATGATCACCAAGTCAGG | 362 |
| + | AGAGTCCATTGTAAAACGCC | 363 |
| + | AGTGGAACGATCCAAGAAGC | 364 |
| + | TGTTGCTGAGCACAGACTTG | 365 |
| − | AGTGGCATCTCCATCATCGT | 366 |
| − | GTGGCCATCATCATCATCAG | 367 |
| + | ACTCACCACAGCCACCGCCT | 368 |

[0153] The Cas protein and the gRNA form a complex, and the Cas protein cleaves the target ALDH1L1, ALDOB, G6PC, LRP2, RPL3L, SLC25A45, or SLC7A9 genomic nucleic acid molecule. The Cas protein can cleave the nucleic acid molecule at a site within or outside of the nucleic acid sequence present in the target ALDH1L1, ALDOB, G6PC, LRP2, RPL3L, SLC25A45, or SLC7A9 genomic nucleic acid molecule to which the DNA-targeting segment of a gRNA will bind. For example, formation of a CRISPR complex (comprising a gRNA hybridized to a gRNA recognition sequence and complexed with a Cas protein) can result in cleavage of one or both strands in or near (such as, for example, within 1, 2, 3, 4, 5, 6, 7, 8, 9, 10, 20, 50, or more base pairs from) the nucleic acid sequence present in the ALDH1L1, ALDOB, G6PC, LRP2, RPL3L, SLC25A45, or SLC7A9 genomic nucleic acid molecule to which a DNA-targeting segment of a gRNA will bind.

[0154] Such methods can result, for example, in an ALDH1L1 genomic nucleic acid molecule in which a region of SEQ ID NO:1 is disrupted, the start codon is disrupted, the stop codon is disrupted, or the coding sequence is disrupted or deleted. Optionally, the cell can be further contacted with one or more additional gRNAs that hybridize to additional gRNA recognition sequences within the target genomic locus in the ALDH1L1 genomic nucleic acid molecule. By contacting the cell with one or more additional gRNAs (such as, for example, a second gRNA that hybridizes to a second gRNA recognition sequence), cleavage by the Cas protein can create two or more double-strand breaks or two or more single-strand breaks.

[0155] Such methods can also result, for example, in an ALDOB genomic nucleic acid molecule in which a region of SEQ ID NO:73 is disrupted, the start codon is disrupted, the stop codon is disrupted, or the coding sequence is disrupted or deleted. Optionally, the cell can be further contacted with one or more additional gRNAs that hybridize to additional gRNA recognition sequences within the target genomic locus in the ALDOB genomic nucleic acid molecule. By contacting the cell with one or more additional gRNAs (such as, for example, a second gRNA that hybridizes to a second gRNA recognition sequence), cleavage by the Cas protein can create two or more double-strand breaks or two or more single-strand breaks.

[0156] Such methods can also result, for example, in a G6PC genomic nucleic acid molecule in which a region of SEQ ID NO:102 is disrupted, the start codon is disrupted, the stop codon is disrupted, or the coding sequence is disrupted or deleted. Optionally, the cell can be further contacted with one or more additional gRNAs that hybridize to additional gRNA recognition sequences within the target genomic locus in the G6PC genomic nucleic acid molecule. By contacting the cell with one or more additional gRNAs (such as, for example, a second gRNA that hybridizes to a second gRNA recognition sequence), cleavage by the Cas protein can create two or more double-strand breaks or two or more single-strand breaks.

[0157] Such methods can also result, for example, in an LRP2 genomic nucleic acid molecule in which a region of SEQ ID NO:120 is disrupted, the start codon is disrupted, the stop codon is disrupted, or the coding sequence is disrupted or deleted. Optionally, the cell can be further contacted with one or more additional gRNAs that hybridize to additional gRNA recognition sequences within the target genomic locus in the LRP2 genomic nucleic acid molecule. By contacting the cell with one or more additional gRNAs (such as, for example, a second gRNA that hybridizes to a second gRNA recognition sequence), cleavage by the Cas protein can create two or more double-strand breaks or two or more single-strand breaks.

[0158] Such methods can also result, for example, in an RPL3L genomic nucleic acid molecule in which a region of SEQ ID NO:144 is disrupted, the start codon is disrupted, the stop codon is disrupted, or the coding sequence is disrupted or deleted. Optionally, the cell can be further contacted with one or more additional gRNAs that hybridize to additional gRNA recognition sequences within the target genomic locus in the RPL3L genomic nucleic acid molecule. By contacting the cell with one or more additional gRNAs (such as, for example, a second gRNA that hybridizes to a second gRNA recognition sequence), cleavage by the Cas protein can create two or more double-strand breaks or two or more single-strand breaks.

[0159] Such methods can also result, for example, in an SLC25A45 genomic nucleic acid molecule in which a region of SEQ ID NO:159 is disrupted, the start codon is disrupted, the stop codon is disrupted, or the coding sequence is disrupted or deleted. Optionally, the cell can be further contacted with one or more additional gRNAs that hybridize to additional gRNA recognition sequences within the target genomic locus in the SLC25A45 genomic nucleic acid molecule. By contacting the cell with one or more additional gRNAs (such as, for example, a second gRNA that hybridizes to a second gRNA recognition sequence), cleavage by the Cas protein can create two or more double-strand breaks or two or more single-strand breaks.

[0160] Such methods can also result, for example, in an SLC7A9 genomic nucleic acid molecule in which a region of SEQ ID NO:205 is disrupted, the start codon is disrupted, the stop codon is disrupted, or the coding sequence is disrupted or deleted. Optionally, the cell can be further contacted with one or more additional gRNAs that hybridize to additional gRNA recognition sequences within the target genomic locus in the SLC7A9 genomic nucleic acid molecule. By contacting the cell with one or more additional gRNAs (such as, for example, a second gRNA that hybridizes to a second gRNA recognition sequence), cleavage by the Cas protein can create two or more double-strand breaks or two or more single-strand breaks.

[0161] In some embodiments, the methods of treatment and/or prevention further comprise detecting the presence or absence of one or more of ALDH1L1, ALDOB, G6PC, LRP2, RPL3L, SLC25A45, or SLC7A9 variant nucleic acid molecule encoding one or more ALDH1L1, ALDOB, G6PC, LRP2, RPL3L, SLC25A45, or SLC7A9 predicted loss-of-function polypeptides in a biological sample from the subject. As used throughout the present disclosure, an “ALDH1L1 variant nucleic acid molecule encoding an ALDH1L1 predicted loss-of-function polypeptide” is any ALDH1L1 nucleic acid molecule (such as, for example, genomic nucleic acid molecule, mRNA molecule, or cDNA molecule) encoding an ALDH1L1 polypeptide having a partial loss-of-function, a complete loss-of-function, a predicted partial loss-of-function, or a predicted complete loss-of-function. As used throughout the present disclosure, an “ALDOB variant nucleic acid molecule encoding an ALDOB predicted loss-of-function polypeptide” is any ALDOB nucleic acid molecule (such as, for example, genomic nucleic acid molecule, mRNA molecule, or cDNA molecule) encoding an ALDOB polypeptide having a partial loss-of-function, a complete loss-of-function, a predicted partial loss-of-function, or a predicted complete loss-of-function. As used throughout the present disclosure, a “G6PC variant nucleic acid molecule encoding a G6PC predicted loss-of-function polypeptide” is any G6PC nucleic acid molecule (such as, for example, genomic nucleic acid molecule, mRNA molecule, or cDNA molecule) encoding a G6PC polypeptide having a partial loss-of-function, a complete loss-of-function, a predicted partial loss-of-function, or a predicted complete loss-of-function. As used throughout the present disclosure, an “LRP2 variant nucleic acid molecule encoding an LRP2 predicted loss-of-function polypeptide” is any LRP2 nucleic acid molecule (such as, for example, genomic nucleic acid molecule, mRNA molecule, or cDNA molecule) encoding an LRP2 polypeptide having a partial loss-of-function, a complete loss-of-function, a predicted partial loss-of-function, or a predicted complete loss-of-function. As used throughout the present disclosure, an “RPL3L variant nucleic acid molecule encoding an RPL3L predicted loss-of-function polypeptide” is any RPL3L nucleic acid molecule (such as, for example, genomic nucleic acid molecule, mRNA molecule, or cDNA molecule) encoding an RPL3L polypeptide having a partial loss-of-function, a complete loss-of-function, a predicted partial loss-of-function, or a predicted complete loss-of-function. As used throughout the present disclosure, an “SLC25A45 variant nucleic acid molecule encoding an SLC25A45 predicted loss-of-function polypeptide” is any SLC25A45 nucleic acid molecule (such as, for example, genomic nucleic acid molecule, mRNA molecule, or cDNA molecule) encoding an SLC25A45 polypeptide having a partial loss-of-function, a complete loss-of-function, a predicted partial loss-of-function, or a predicted complete loss-of-function. As used throughout the present disclosure, an “SLC7A9 variant nucleic acid molecule encoding an SLC7A9 predicted loss-of-function polypeptide” is any SLC7A9 nucleic acid molecule (such as, for example, genomic nucleic acid molecule, mRNA molecule, or cDNA molecule) encoding an SLC7A9 polypeptide having a partial loss-of-function, a complete loss-of-function, a predicted partial loss-of-function, or a predicted complete loss-of-function.

[0162] The present disclosure also provides methods of treating a subject with a therapeutic agent that treats or inhibits a kidney disease, wherein the subject has a kidney disease. The present disclosure also provides methods of preventing a subject from developing a kidney disease by administering a therapeutic agent that prevents a kidney disease. In some embodiments, the methods comprise determining whether the subject has an ALDH1L1 variant nucleic acid molecule encoding an ALDH1L1 predicted loss-of-function polypeptide by obtaining or having obtained a biological sample from the subject, and performing or having performed a sequence analysis on the biological sample to determine if the subject has a genotype comprising the ALDH1L1 variant nucleic acid molecule encoding an ALDH1L1 predicted loss-of-function polypeptide. In some embodiments, the methods further comprise administering or continuing to administer the therapeutic agent that treats, prevents, or inhibits the kidney disease in an amount that is the same as or less than a standard dosage amount to a subject that is ALDH1L1 reference, and/or administering an ALDH1L1 inhibitor to the subject. In some embodiments, the methods further comprise administering or continuing to administer the therapeutic agent that treats, prevents, or inhibits the kidney disease in an amount that is the same as or less than a standard dosage amount to a subject that is heterozygous for the ALDH1L1 variant nucleic acid molecule, and/or administering an ALDH1L1 inhibitor to the subject. In some embodiments, the methods further comprise administering or continuing to administer the therapeutic agent that treats, prevents, or inhibits the kidney disease in a standard dosage amount to a subject that is homozygous for the ALDH1L1 variant nucleic acid molecule. The presence of a genotype having the ALDH1L1 variant nucleic acid molecule encoding the ALDH1L1 predicted loss-of-function polypeptide indicates the subject has a decreased risk of developing a kidney disease. In some embodiments, the subject is ALDH1L1 reference. In some embodiments, the subject is heterozygous for an ALDH1L1 variant nucleic acid molecule encoding an ALDH1L1 predicted loss-of-function polypeptide.

[0163] For subjects that are genotyped or determined to be either ALDH1L1 reference or heterozygous for an ALDH1L1 variant nucleic acid molecule encoding an ALDH1L1 predicted loss-of-function polypeptide, such subjects can be administered an ALDH1L1 inhibitor, as described herein.

[0164] The present disclosure also provides methods of treating a subject with a therapeutic agent that treats or inhibits a kidney disease, wherein the subject has a kidney disease. The present disclosure also provides methods of preventing a subject from developing a kidney disease by administering a therapeutic agent that prevents the kidney disease. In some embodiments, the methods comprise determining whether the subject has an ALDOB variant nucleic acid molecule encoding an ALDOB predicted loss-of-function polypeptide by obtaining or having obtained a biological sample from the subject, and performing or having performed a sequence analysis on the biological sample to determine if the subject has a genotype comprising the ALDOB variant nucleic acid molecule encoding an ALDOB predicted loss-of-function polypeptide. In some embodiments, the methods further comprise administering or continuing to administer the therapeutic agent that treats, prevents, or inhibits the kidney disease in an amount that is the same as or less than a standard dosage amount to a subject that is ALDOB reference, and/or administering an ALDOB inhibitor to the subject. In some embodiments, the methods further comprise administering or continuing to administer the therapeutic agent that treats, prevents, or inhibits the kidney disease in an amount that is the same as or less than a standard dosage amount to a subject that is heterozygous for the ALDOB variant nucleic acid molecule, and/or administering an ALDOB inhibitor to the subject. In some embodiments, the methods further comprise administering or continuing to administer the therapeutic agent that treats, prevents, or inhibits the kidney disease in a standard dosage amount to a subject that is homozygous for the ALDOB variant nucleic acid molecule. The presence of a genotype having the ALDOB variant nucleic acid molecule encoding the ALDOB predicted loss-of-function polypeptide indicates the subject has a decreased risk of developing a kidney disease. In some embodiments, the subject is ALDOB reference. In some embodiments, the subject is heterozygous for an ALDOB variant nucleic acid molecule encoding an ALDOB predicted loss-of-function polypeptide.

[0165] For subjects that are genotyped or determined to be either ALDOB reference or heterozygous for an ALDOB variant nucleic acid molecule encoding an ALDOB predicted loss-of-function polypeptide, such subjects can be administered an ALDOB inhibitor, as described herein.

[0166] The present disclosure also provides methods of treating a subject with a therapeutic agent that treats or inhibits a kidney disease, wherein the subject has a kidney disease. The present disclosure also provides methods of preventing a subject from developing a kidney disease by administering a therapeutic agent that prevents the kidney disease. In some embodiments, the methods comprise determining whether the subject has an LRP2 variant nucleic acid molecule encoding an LRP2 predicted loss-of-function polypeptide by obtaining or having obtained a biological sample from the subject, and performing or having performed a sequence analysis on the biological sample to determine if the subject has a genotype comprising the LRP2 variant nucleic acid molecule encoding an LRP2 predicted loss-of-function polypeptide. In some embodiments, the methods further comprise administering or continuing to administer the therapeutic agent that treats, prevents, or inhibits the kidney disease in an amount that is the same as or less than a standard dosage amount to a subject that is LRP2 reference, and/or administering an LRP2 inhibitor to the subject. In some embodiments, the methods further comprise administering or continuing to administer the therapeutic agent that treats, prevents, or inhibits the kidney disease in an amount that is the same as or less than a standard dosage amount to a subject that is heterozygous for the LRP2 variant nucleic acid molecule, and/or administering an LRP2 inhibitor to the subject. In some embodiments, the methods further comprise administering or continuing to administer the therapeutic agent that treats, prevents, or inhibits the kidney disease in a standard dosage amount to a subject that is homozygous for the LRP2 variant nucleic acid molecule. The presence of a genotype having the LRP2 variant nucleic acid molecule encoding the LRP2 predicted loss-of-function polypeptide indicates the subject has a decreased risk of developing a kidney disease. In some embodiments, the subject is LRP2 reference. In some embodiments, the subject is heterozygous for an LRP2 variant nucleic acid molecule encoding an LRP2 predicted loss-of-function polypeptide.

[0167] For subjects that are genotyped or determined to be either LRP2 reference or heterozygous for an LRP2 variant nucleic acid molecule encoding an LRP2 predicted loss-of-function polypeptide, such subjects can be administered an LRP2 inhibitor, as described herein.

[0168] The present disclosure also provides methods of treating a subject with a therapeutic agent that treats or inhibits a kidney disease, wherein the subject has a kidney disease. The present disclosure also provides methods of preventing a subject from developing a kidney disease by administering a therapeutic agent that prevents the kidney disease. In some embodiments, the methods comprise determining whether the subject has an RPL3L variant nucleic acid molecule encoding an RPL3L predicted loss-of-function polypeptide by obtaining or having obtained a biological sample from the subject, and performing or having performed a sequence analysis on the biological sample to determine if the subject has a genotype comprising the RPL3L variant nucleic acid molecule encoding an RPL3L predicted loss-of-function polypeptide. In some embodiments, the methods further comprise administering or continuing to administer the therapeutic agent that treats, prevents, or inhibits the kidney disease in an amount that is the same as or less than a standard dosage amount to a subject that is RPL3L reference, and/or administering an RPL3L inhibitor to the subject. In some embodiments, the methods further comprise administering or continuing to administer the therapeutic agent that treats, prevents, or inhibits the kidney disease in an amount that is the same as or less than a standard dosage amount to a subject that is heterozygous for the RPL3L variant nucleic acid molecule, and/or administering an RPL3L inhibitor to the subject. In some embodiments, the methods further comprise administering or continuing to administer the therapeutic agent that treats, prevents, or inhibits the kidney disease in a standard dosage amount to a subject that is homozygous for the RPL3L variant nucleic acid molecule. The presence of a genotype having the RPL3L variant nucleic acid molecule encoding the RPL3L predicted loss-of-function polypeptide indicates the subject has a decreased risk of developing a kidney disease. In some embodiments, the subject is RPL3L reference. In some embodiments, the subject is heterozygous for an RPL3L variant nucleic acid molecule encoding an RPL3L predicted loss-of-function polypeptide.

[0169] For subjects that are genotyped or determined to be either RPL3L reference or heterozygous for an RPL3L variant nucleic acid molecule encoding an RPL3L predicted loss-of-function polypeptide, such subjects can be administered an RPL3L inhibitor, as described herein.

[0170] The present disclosure also provides methods of treating a subject with a therapeutic agent that treats or inhibits a kidney disease, wherein the subject has a kidney disease. The present disclosure also provides methods of preventing a subject from developing a kidney disease by administering a therapeutic agent that prevents the kidney disease. In some embodiments, the methods comprise determining whether the subject has an SLC25A45 variant nucleic acid molecule encoding an SLC25A45 predicted loss-of-function polypeptide by obtaining or having obtained a biological sample from the subject, and performing or having performed a sequence analysis on the biological sample to determine if the subject has a genotype comprising the SLC25A45 variant nucleic acid molecule encoding an SLC25A45 predicted loss-of-function polypeptide. In some embodiments, the methods further comprise administering or continuing to administer the therapeutic agent that treats, prevents, or inhibits the kidney disease in an amount that is the same as or less than a standard dosage amount to a subject that is SLC25A45 reference, and/or administering an SLC25A45 inhibitor to the subject. In some embodiments, the methods further comprise administering or continuing to administer the therapeutic agent that treats, prevents, or inhibits the kidney disease in an amount that is the same as or less than a standard dosage amount to a subject that is heterozygous for the SLC25A45 variant nucleic acid molecule, and/or administering an SLC25A45 inhibitor to the subject. In some embodiments, the methods further comprise administering or continuing to administer the therapeutic agent that treats, prevents, or inhibits the kidney disease in a standard dosage amount to a subject that is homozygous for the SLC25A45 variant nucleic acid molecule. The presence of a genotype having the SLC25A45 variant nucleic acid molecule encoding the SLC25A45 predicted loss-of-function polypeptide indicates the subject has a decreased risk of developing a kidney disease. In some embodiments, the subject is SLC25A45 reference. In some embodiments, the subject is heterozygous for an SLC25A45 variant nucleic acid molecule encoding an SLC25A45 predicted loss-of-function polypeptide.

[0171] For subjects that are genotyped or determined to be either SLC25A45 reference or heterozygous for an SLC25A45 variant nucleic acid molecule encoding an SLC25A45 predicted loss-of-function polypeptide, such subjects can be administered an SLC25A45 inhibitor, as described herein.

[0172] The present disclosure also provides methods of treating a subject with a therapeutic agent that treats or inhibits a kidney disease, wherein the subject has a kidney disease. The present disclosure also provides methods of preventing a subject from developing a kidney disease by administering a therapeutic agent that prevents the kidney disease. In some embodiments, the methods comprise determining whether the subject has an SLC7A9 variant nucleic acid molecule encoding an SLC7A9 predicted loss-of-function polypeptide by obtaining or having obtained a biological sample from the subject, and performing or having performed a sequence analysis on the biological sample to determine if the subject has a genotype comprising the SLC7A9 variant nucleic acid molecule encoding an SLC7A9 predicted loss-of-function polypeptide. In some embodiments, the methods further comprise administering or continuing to administer the therapeutic agent that treats, prevents, or inhibits the kidney disease in an amount that is the same as or less than a standard dosage amount to a subject that is SLC7A9 reference, and/or administering an SLC7A9 inhibitor to the subject. In some embodiments, the methods further comprise administering or continuing to administer the therapeutic agent that treats, prevents, or inhibits the kidney disease in an amount that is the same as or less than a standard dosage amount to a subject that is heterozygous for the SLC7A9 variant nucleic acid molecule, and/or administering an SLC7A9 inhibitor to the subject. In some embodiments, the methods further comprise administering or continuing to administer the therapeutic agent that treats, prevents, or inhibits the kidney disease in a standard dosage amount to a subject that is homozygous for the SLC7A9 variant nucleic acid molecule. The presence of a genotype having the SLC7A9 variant nucleic acid molecule encoding the SLC7A9 predicted loss-of-function polypeptide indicates the subject has a decreased risk of developing a kidney disease. In some embodiments, the subject is SLC7A9 reference. In some embodiments, the subject is heterozygous for an SLC7A9 variant nucleic acid molecule encoding an SLC7A9 predicted loss-of-function polypeptide.

[0173] For subjects that are genotyped or determined to be either SLC7A9 reference or heterozygous for an SLC7A9 variant nucleic acid molecule encoding an SLC7A9 predicted loss-of-function polypeptide, such subjects can be administered an SLC7A9 inhibitor, as described herein.

[0174] Detecting the presence or absence of one or more ALDH1L1, ALDOB, G6PC, LRP2, RPL3L, SLC25A45, and/or SLC7A9 variant nucleic acid molecules encoding one or more ALDH1L1, ALDOB, G6PC, LRP2, RPL3L, SLC25A45, or SLC7A9 predicted loss-of-function polypeptides in a biological sample from a subject and/or determining whether a subject has one or more ALDH1L1, ALDOB, G6PC, LRP2, RPL3L, SLC25A45, or SLC7A9 variant nucleic acid molecules encoding one or more ALDH1L1, ALDOB, G6PC, LRP2, RPL3L, SLC25A45, or SLC7A9 predicted loss-of-function polypeptides can be carried out by any of the methods described herein. In some embodiments, these methods can be carried out in vitro. In some embodiments, these methods can be carried out in situ. In some embodiments, these methods can be carried out in vivo. In any of these embodiments, the nucleic acid molecule can be present within a cell obtained from the subject.

[0175] In some embodiments, when the subject is ALDH1L1 reference, the subject is administered a therapeutic agent that treats, prevents, or inhibits a kidney disease in an amount that is the same as or less than a standard dosage amount. In some embodiments, when the subject is heterozygous for an ALDH1L1 variant nucleic acid molecule encoding an ALDH1L1 predicted loss-of-function polypeptide, the subject is administered a therapeutic agent that treats, prevents, or inhibits a kidney disease in a dosage amount that is the same as or less than a standard dosage amount.

[0176] In some embodiments, when the subject is ALDOB reference, the subject is administered a therapeutic agent that treats, prevents, or inhibits a kidney disease in an amount that is the same as or less than a standard dosage amount. In some embodiments, when the subject is heterozygous for an ALDOB variant nucleic acid molecule encoding an ALDOB predicted loss-of-function polypeptide, the subject is administered a therapeutic agent that treats, prevents, or inhibits a kidney disease in a dosage amount that is the same as or less than a standard dosage amount.

[0177] In some embodiments, when the subject is G6PC reference, the subject is administered a therapeutic agent that treats, prevents, or inhibits a kidney disease in an amount that is the same as or less than a standard dosage amount. In some embodiments, when the subject is heterozygous for a G6PC variant nucleic acid molecule encoding a G6PC predicted loss-of-function polypeptide, the subject is administered a therapeutic agent that treats, prevents, or inhibits a kidney disease in a dosage amount that is the same as or less than a standard dosage amount.

[0178] In some embodiments, when the subject is LRP2 reference, the subject is administered a therapeutic agent that treats, prevents, or inhibits a kidney disease in an amount that is the same as or less than a standard dosage amount. In some embodiments, when the subject is heterozygous for an LRP2 variant nucleic acid molecule encoding an LRP2 predicted loss-of-function polypeptide, the subject is administered a therapeutic agent that treats, prevents, or inhibits a kidney disease in a dosage amount that is the same as or less than a standard dosage amount.

[0179] In some embodiments, when the subject is RPL3L reference, the subject is administered a therapeutic agent that treats, prevents, or inhibits a kidney disease in an amount that is the same as or less than a standard dosage amount. In some embodiments, when the subject is heterozygous for an RPL3L variant nucleic acid molecule encoding an RPL3L predicted loss-of-function polypeptide, the subject is administered a therapeutic agent that treats, prevents, or inhibits a kidney disease in a dosage amount that is the same as or less than a standard dosage amount.

[0180] In some embodiments, when the subject is SLC25A45 reference, the subject is administered a therapeutic agent that treats, prevents, or inhibits a kidney disease in an amount that is the same as or less than a standard dosage amount. In some embodiments, when the subject is heterozygous for an SLC25A45 variant nucleic acid molecule encoding an SLC25A45 predicted loss-of-function polypeptide, the subject is administered a therapeutic agent that treats, prevents, or inhibits a kidney disease in a dosage amount that is the same as or less than a standard dosage amount.

[0181] In some embodiments, when the subject is SLC7A9 reference, the subject is administered a therapeutic agent that treats, prevents, or inhibits a kidney disease in an amount that is the same as or less than a standard dosage amount. In some embodiments, when the subject is heterozygous for an SLC7A9 variant nucleic acid molecule encoding an SLC7A9 predicted loss-of-function polypeptide, the subject is administered a therapeutic agent that treats, prevents, or inhibits a kidney disease in a dosage amount that is the same as or less than a standard dosage amount.

[0182] In any of the embodiments described herein, when the subject is reference for any combination of two or more of ALDH1L1, ALDOB, G6PC, LRP2, RPL3L, SLC25A45, and SLC7A9, the subject is administered a therapeutic agent that treats, prevents, or inhibits a kidney disease in an amount that is the same as or less than a standard dosage amount. In any of the embodiments described herein, when the subject is is heterozygous for any combination of two or more of ALDH1L1, ALDOB, G6PC, LRP2, RPL3L, SLC25A45, and SLC7A9 variant nucleic acid molecules encoding any combination of two or more of ALDH1L1, ALDOB, G6PC, LRP2, RPL3L, SLC25A45, and SLC7A9 predicted loss-of-function polypeptides, the subject is administered a therapeutic agent that treats, prevents, or inhibits a kidney disease in a dosage amount that is the same as or less than a standard dosage amount.

[0183] In some embodiments, the treatment and/or prevention methods further comprise detecting the presence or absence of an ALDH1L1 predicted loss-of-function polypeptide in a biological sample from the subject. In some embodiments, when the subject does not have an ALDH1L1 predicted loss-of-function polypeptide, the subject is also administered a therapeutic agent that treats, prevents, or inhibits a kidney disease in an amount that is the same as or less than a standard dosage amount. In some embodiments, when the subject has an ALDH1L1 predicted loss-of-function polypeptide, the subject is also administered a therapeutic agent that treats, prevents, or inhibits a kidney disease in amount that is the same as or less than a standard dosage amount.

[0184] In some embodiments, the treatment and/or prevention methods further comprise detecting the presence or absence of an ALDOB predicted loss-of-function polypeptide in a biological sample from the subject. In some embodiments, when the subject does not have an ALDOB predicted loss-of-function polypeptide, the subject is also administered a therapeutic agent that treats, prevents, or inhibits a kidney disease in an amount that is the same as or less than a standard dosage amount. In some embodiments, when the subject has an ALDOB predicted loss-of-function polypeptide, the subject is also administered a therapeutic agent that treats, prevents, or inhibits a kidney disease in a dosage amount that is the same as or less than a standard dosage amount.

[0185] In some embodiments, the treatment and/or prevention methods further comprise detecting the presence or absence of a G6PC predicted loss-of-function polypeptide in a biological sample from the subject. In some embodiments, when the subject does not have a G6PC predicted loss-of-function polypeptide, the subject is also administered a therapeutic agent that treats, prevents, or inhibits a kidney disease in an amount that is the same as or less than a standard dosage amount. In some embodiments, when the subject has a G6PC predicted loss-of-function polypeptide, the subject is also administered a therapeutic agent that treats, prevents, or inhibits a kidney disease in a dosage amount that is the same as or less than a standard dosage amount.

[0186] In some embodiments, the treatment and/or prevention methods further comprise detecting the presence or absence of an LRP2 predicted loss-of-function polypeptide in a biological sample from the subject. In some embodiments, when the subject does not have an LRP2 predicted loss-of-function polypeptide, the subject is also administered a therapeutic agent that treats, prevents, or inhibits a kidney disease in an amount that is the same as or less than a standard dosage amount. In some embodiments, when the subject has an LRP2 predicted loss-of-function polypeptide, the subject is also administered a therapeutic agent that treats, prevents, or inhibits a kidney disease in a dosage amount that is the same as or less than a standard dosage amount.

[0187] In some embodiments, the treatment and/or prevention methods further comprise detecting the presence or absence of an RPL3L predicted loss-of-function polypeptide in a biological sample from the subject. In some embodiments, when the subject does not have an RPL3L predicted loss-of-function polypeptide, the subject is also administered a therapeutic agent that treats, prevents, or inhibits a kidney disease in an amount that is the same as or less than a standard dosage amount. In some embodiments, when the subject has an RPL3L predicted loss-of-function polypeptide, the subject is also administered a therapeutic agent that treats, prevents, or inhibits a kidney disease in a dosage amount that is the same as or less than a standard dosage amount.

[0188] In some embodiments, the treatment and/or prevention methods further comprise detecting the presence or absence of an SLC25A45 predicted loss-of-function polypeptide in a biological sample from the subject. In some embodiments, when the subject does not have an SLC25A45 predicted loss-of-function polypeptide, the subject is also administered a therapeutic agent that treats, prevents, or inhibits a kidney disease in an amount that is the same as or less than a standard dosage amount. In some embodiments, when the subject has an SLC25A45 predicted loss-of-function polypeptide, the subject is also administered a therapeutic agent that treats, prevents, or inhibits a kidney disease in a dosage amount that is the same as or less than a standard dosage amount.

[0189] In some embodiments, the treatment and/or prevention methods further comprise detecting the presence or absence of an SLC7A9 predicted loss-of-function polypeptide in a biological sample from the subject. In some embodiments, when the subject does not have an SLC7A9 predicted loss-of-function polypeptide, the subject is also administered a therapeutic agent that treats, prevents, or inhibits a kidney disease in an amount that is the same as or less than a standard dosage amount. In some embodiments, when the subject has an SLC7A9 predicted loss-of-function polypeptide, the subject is also administered a therapeutic agent that treats, prevents, or inhibits a kidney disease in a dosage amount that is the same as or less than a standard dosage amount.

[0190] The present disclosure also provides methods of treating a subject with a therapeutic agent that treats or inhibits a kidney disease, wherein the subject has a kidney disease. In some embodiments, the method comprises determining whether the subject has an ALDH1L1 predicted loss-of-function polypeptide by obtaining or having obtained a biological sample from the subject, and performing or having performed an assay on the biological sample to determine if the subject has an ALDH1L1 predicted loss-of-function polypeptide. When the subject does not have an ALDH1L1 predicted loss-of-function polypeptide, the therapeutic agent that treats or inhibits the kidney disease is administered or continued to be administered to the subject in an amount that is the same as or less than a standard dosage amount, and/or an ALDH1L1 inhibitor is administered to the subject. When the subject has an ALDH1L1 predicted loss-of-function polypeptide, the therapeutic agent that treats or inhibits the kidney disease is administered or continued to be administered to the subject in an amount that is the same as or less than a standard dosage amount, and/or an ALDH1L1 inhibitor is administered to the subject. The presence of an ALDH1L1 predicted loss-of-function polypeptide indicates the subject has a decreased risk of developing a kidney disease. In some embodiments, the subject has an ALDH1L1 predicted loss-of-function polypeptide. In some embodiments, the subject does not have an ALDH1L1 predicted loss-of-function polypeptide.

[0191] The present disclosure also provides methods of preventing a subject from developing a kidney disease by administering a therapeutic agent that prevents the kidney disease. In some embodiments, the method comprises determining whether the subject has an ALDH1L1 predicted loss-of-function polypeptide by obtaining or having obtained a biological sample from the subject, and performing or having performed an assay on the biological sample to determine if the subject has an ALDH1L1 predicted loss-of-function polypeptide. When the subject does not have an ALDH1L1 predicted loss-of-function polypeptide, the therapeutic agent that prevents the kidney disease is administered or continued to be administered to the subject in an amount that is the same as or less than a standard dosage amount, and/or an ALDH1L1 inhibitor is administered to the subject. When the subject has an ALDH1L1 predicted loss-of-function polypeptide, the therapeutic agent that prevents the kidney disease is administered or continued to be administered to the subject in an amount that is the same as or less than a standard dosage amount, and/or an ALDH1L1 inhibitor is administered to the subject. The presence of an ALDH1L1 predicted loss-of-function polypeptide indicates the subject has a decreased risk of developing a kidney disease. In some embodiments, the subject has an ALDH1L1 predicted loss-of-function polypeptide. In some embodiments, the subject does not have an ALDH1L1 predicted loss-of-function polypeptide.

[0192] Detecting the presence or absence of an ALDH1L1 predicted loss-of-function polypeptide in a biological sample from a subject and/or determining whether a subject has an ALDH1L1 predicted loss-of-function polypeptide can be carried out by any of the methods described herein. In some embodiments, these methods can be carried out in vitro. In some embodiments, these methods can be carried out in situ. In some embodiments, these methods can be carried out in vivo. In any of these embodiments, the polypeptide can be present within a cell obtained from the subject.

[0193] In some embodiments, the ALDH1L1 inhibitor is a small molecule. In some embodiments, the ALDH1L1 inhibitor is gossypol. In some embodiments, the ALDH1L1 inhibitor is N,N-diethylaminobenzaldehyde (DEAB). Additional inhibitors are disclosed in, for example, Koppaka et al., Pharmacol. Rev., 2012, 64, 520-539.

[0194] The present disclosure also provides methods of treating a subject with a therapeutic agent that treats or inhibits a kidney disease, wherein the subject has a kidney disease. In some embodiments, the method comprises determining whether the subject has an ALDOB predicted loss-of-function polypeptide by obtaining or having obtained a biological sample from the subject, and performing or having performed an assay on the biological sample to determine if the subject has an ALDOB predicted loss-of-function polypeptide. When the subject does not have an ALDOB predicted loss-of-function polypeptide, the therapeutic agent that treats or inhibits the kidney disease is administered or continued to be administered to the subject in an amount that is the same as or less than a standard dosage amount, and/or an ALDOB inhibitor is administered to the subject. When the subject has an ALDOB predicted loss-of-function polypeptide, the therapeutic agent that treats or inhibits the kidney disease is administered or continued to be administered to the subject in an amount that is the same as or less than a standard dosage amount, and/or an ALDOB inhibitor is administered to the subject. The presence of an ALDOB predicted loss-of-function polypeptide indicates the subject has a decreased risk of developing a kidney disease. In some embodiments, the subject has an ALDOB predicted loss-of-function polypeptide. In some embodiments, the subject does not have an ALDOB predicted loss-of-function polypeptide.

[0195] The present disclosure also provides methods of preventing a subject from developing a kidney disease by administering a therapeutic agent that prevents the kidney disease. In some embodiments, the method comprises determining whether the subject has an ALDOB predicted loss-of-function polypeptide by obtaining or having obtained a biological sample from the subject, and performing or having performed an assay on the biological sample to determine if the subject has an ALDOB predicted loss-of-function polypeptide. When the subject does not have an ALDOB predicted loss-of-function polypeptide, the therapeutic agent that prevents the kidney disease is administered or continued to be administered to the subject in an amount that is the same as or less than a standard dosage amount, and/or an ALDOB inhibitor is administered to the subject. When the subject has an ALDOB predicted loss-of-function polypeptide, the therapeutic agent that prevents the kidney disease is administered or continued to be administered to the subject in an amount that is the same as or less than a standard dosage amount, and/or an ALDOB inhibitor is administered to the subject. The presence of an ALDOB predicted loss-of-function polypeptide indicates the subject has a decreased risk of developing a kidney disease. In some embodiments, the subject has an ALDOB predicted loss-of-function polypeptide. In some embodiments, the subject does not have an ALDOB predicted loss-of-function polypeptide.

[0196] Detecting the presence or absence of an ALDOB predicted loss-of-function polypeptide in a biological sample from a subject and/or determining whether a subject has an ALDOB predicted loss-of-function polypeptide can be carried out by any of the methods described herein. In some embodiments, these methods can be carried out in vitro. In some embodiments, these methods can be carried out in situ. In some embodiments, these methods can be carried out in vivo. In any of these embodiments, the polypeptide can be present within a cell obtained from the subject.

[0197] In some embodiments, the ALDOB inhibitor is a small molecule. In some embodiments, the ALDOB inhibitor is TDZD-8. Small molecule inhibitors of aldolase include, but are not limited to, phosphorylated α-dicarbonyl compounds (e.g., phosphoric acid mono-(2,3-dioxo-butyl) ester. Additional inhibitors are disclosed in, for example, U.S. Patent Application Publication No. 2019/0231761, Charbot et al., J. Enzyme Inhibition Med. Chem., 2008, 23, 21-27, and Daher et al., ACS Med. Chem. Lett., 2010, 1, 101-104.

[0198] The present disclosure also provides methods of treating a subject with a therapeutic agent that treats or inhibits a kidney disease, wherein the subject has a kidney disease. In some embodiments, the method comprises determining whether the subject has a G6PC predicted loss-of-function polypeptide by obtaining or having obtained a biological sample from the subject, and performing or having performed an assay on the biological sample to determine if the subject has a G6PC predicted loss-of-function polypeptide. When the subject does not have a G6PC predicted loss-of-function polypeptide, the therapeutic agent that treats or inhibits the kidney disease is administered or continued to be administered to the subject in an amount that is the same as or less than a standard dosage amount, and/or a G6PC inhibitor is administered to the subject. When the subject has a G6PC predicted loss-of-function polypeptide, the therapeutic agent that treats or inhibits the kidney disease is administered or continued to be administered to the subject in an amount that is the same as or less than a standard dosage amount, and/or a G6PC inhibitor is administered to the subject. The presence of a G6PC predicted loss-of-function polypeptide indicates the subject has a decreased risk of developing a kidney disease. In some embodiments, the subject has a G6PC predicted loss-of-function polypeptide. In some embodiments, the subject does not have a G6PC predicted loss-of-function polypeptide.

[0199] The present disclosure also provides methods of preventing a subject from developing a kidney disease by administering a therapeutic agent that prevents the kidney disease. In some embodiments, the method comprises determining whether the subject has a G6PC predicted loss-of-function polypeptide by obtaining or having obtained a biological sample from the subject, and performing or having performed an assay on the biological sample to determine if the subject has a G6PC predicted loss-of-function polypeptide. When the subject does not have a G6PC predicted loss-of-function polypeptide, the therapeutic agent that prevents the kidney disease is administered or continued to be administered to the subject in an amount that is the same as or less than a standard dosage amount, and/or a G6PC inhibitor is administered to the subject. When the subject has a G6PC predicted loss-of-function polypeptide, the therapeutic agent that prevents the kidney disease is administered or continued to be administered to the subject in an amount that is the same as or less than a standard dosage amount, and/or a G6PC inhibitor is administered to the subject. The presence of a G6PC predicted loss-of-function polypeptide indicates the subject has a decreased risk of developing a kidney disease. In some embodiments, the subject has a G6PC predicted loss-of-function polypeptide. In some embodiments, the subject does not have a G6PC predicted loss-of-function polypeptide.

[0200] Detecting the presence or absence of a G6PC predicted loss-of-function polypeptide in a biological sample from a subject and/or determining whether a subject has a G6PC predicted loss-of-function polypeptide can be carried out by any of the methods described herein. In some embodiments, these methods can be carried out in vitro. In some embodiments, these methods can be carried out in situ. In some embodiments, these methods can be carried out in vivo. In any of these embodiments, the polypeptide can be present within a cell obtained from the subject.

[0201] In some embodiments, the G6PC inhibitor is a small molecule. In some embodiments, the G6PC inhibitor is 4,5,6,7-tetrahydrothieno[3,2-c]-and-[2,3-c]pyridine. In some embodiments, the G6PC inhibitor is a chlorogenic acid derivative, for example S-4048. Numerous chlorogenic acid derivative that inhibit G6PC are described in, for example, Arion et al., Arch. Biochem. Biophys., 1997, 339, 315-322, Herling et al., Eur. J. Pharmacol., 1999, 386, 75-82; and Herling et al., Am. J. Physiol., 1998, 274, G1087-G1093. In some embodiments, the G6PC inhibitor is 3-mercaptopicolinate. In some embodiments, the G6PC inhibitor is 1-cyclohexyl-3-(2-morpholinoethyl)carbodiimide. In some embodiments, the G6PC inhibitor is an alkanonyl glycoside. In some embodiments, the G6PC inhibitor is a (3-pyridin-2-yl-thiouriedo)alkanoic acid ester. In some embodiments, the G6PC inhibitor is a bicyclic biaryl. In some embodiments, the G6PC inhibitor is a N,N-dibenzyl-N′-benzylidenehydrazine. In some embodiments, the G6PC inhibitor is a peroxyvanadium or vandate compound. In some embodiments, the G6PC inhibitor is tungstate. In some embodiments, the G6PC inhibitor is an unsaturated aliphatic aldehydes and ketone. In some embodiments, the G6PC inhibitor is pentamidine. In some embodiments, the G6PC inhibitor is amiloride. In some embodiments, the G6PC inhibitor is methylthioadenosine sulfoxide. In some embodiments, the G6PC inhibitor is diethyl pyrocarbonate (DEPC). In some embodiments, the G6PC inhibitor is 4,4′-diisothiocyanostilbene 2,2′-disulfonic acid (DIDS). In some embodiments, the G6PC inhibitor is a N-alkylmaleimide. In some embodiments, the G6PC inhibitor is p-chloromercuribenzenesulphonate. In some embodiments, the G6PC inhibitor is an orthophosphate ester. In some embodiments, the G6PC inhibitor is 4-Hydroxynonenal. In some embodiments, the G6PC inhibitor is p-aminophenol. In some embodiments, the G6PC inhibitor is saccharin. In some embodiments, the G6PC inhibitor is phlorizin. In some embodiments, the G6PC inhibitor is cyclamate. In some embodiments, the G6PC inhibitor is a sulfhydryl compound. In some embodiments, the G6PC inhibitor is an α-bromo-, α,α-dibromo-, or α-bromo-α,β-unsaturated phosphonate. In some embodiments, the G6PC inhibitor is 4-methoxyphenyl-[4-(4-methoxyphenyl)-4,5,6,7-tetrahydrothieno[3,2-c]pyridin-5-yl]methanone or 4-methoxyphenyl-[4-(4-trifluoromethoxyphenyl)-4,5,6,7-tetrahydrothieno[3,2-c]pyridin-5-yl]methanone.

[0202] The present disclosure also provides methods of treating a subject with a therapeutic agent that treats or inhibits a kidney disease, wherein the subject has a kidney disease. In some embodiments, the method comprises determining whether the subject has an LRP2 predicted loss-of-function polypeptide by obtaining or having obtained a biological sample from the subject, and performing or having performed an assay on the biological sample to determine if the subject has an LRP2 predicted loss-of-function polypeptide. When the subject does not have an LRP2 predicted loss-of-function polypeptide, the therapeutic agent that treats or inhibits the kidney disease is administered or continued to be administered to the subject in an amount that is the same as or less than a standard dosage amount, and/or an LRP2 inhibitor is administered to the subject. When the subject has an LRP2 predicted loss-of-function polypeptide, the therapeutic agent that treats or inhibits the kidney disease is administered or continued to be administered to the subject in an amount that is the same as or less than a standard dosage amount, and/or an LRP2 inhibitor is administered to the subject. The presence of an LRP2 predicted loss-of-function polypeptide indicates the subject has a decreased risk of developing a kidney disease. In some embodiments, the subject has an LRP2 predicted loss-of-function polypeptide. In some embodiments, the subject does not have an LRP2 predicted loss-of-function polypeptide.

[0203] The present disclosure also provides methods of preventing a subject from developing a kidney disease by administering a therapeutic agent that prevents the kidney disease. In some embodiments, the method comprises determining whether the subject has an LRP2 predicted loss-of-function polypeptide by obtaining or having obtained a biological sample from the subject, and performing or having performed an assay on the biological sample to determine if the subject has an LRP2 predicted loss-of-function polypeptide. When the subject does not have an LRP2 predicted loss-of-function polypeptide, the therapeutic agent that prevents the kidney disease is administered or continued to be administered to the subject in an amount that is the same as or less than a standard dosage amount, and/or an LRP2 inhibitor is administered to the subject. When the subject has an LRP2 predicted loss-of-function polypeptide, the therapeutic agent that prevents the kidney disease is administered or continued to be administered to the subject in an amount that is the same as or less than a standard dosage amount, and/or an LRP2 inhibitor is administered to the subject. The presence of an LRP2 predicted loss-of-function polypeptide indicates the subject has a decreased risk of developing a kidney disease. In some embodiments, the subject has an LRP2 predicted loss-of-function polypeptide. In some embodiments, the subject does not have an LRP2 predicted loss-of-function polypeptide.

[0204] Detecting the presence or absence of an LRP2 predicted loss-of-function polypeptide in a biological sample from a subject and/or determining whether a subject has an LRP2 predicted loss-of-function polypeptide can be carried out by any of the methods described herein. In some embodiments, these methods can be carried out in vitro. In some embodiments, these methods can be carried out in situ. In some embodiments, these methods can be carried out in vivo. In any of these embodiments, the polypeptide can be present within a cell obtained from the subject.

[0205] In some embodiments, the LRP2 inhibitor is a small molecule. In some embodiments, the LRP2 inhibitor is an aminoglycoside, such as gentamicin. In some embodiments, the LRP2 inhibitor is polymyxin, such as polymyxin B or polymyxin E (colistin). In some embodiments, the LRP2 inhibitor is aprotinin. In some embodiments, the LRP2 inhibitor is cilastatin.

[0206] The present disclosure also provides methods of treating a subject with a therapeutic agent that treats or inhibits a kidney disease, wherein the subject has a kidney disease. In some embodiments, the method comprises determining whether the subject has an RPL3L predicted loss-of-function polypeptide by obtaining or having obtained a biological sample from the subject, and performing or having performed an assay on the biological sample to determine if the subject has an RPL3L predicted loss-of-function polypeptide. When the subject does not have an RPL3L predicted loss-of-function polypeptide, the therapeutic agent that treats or inhibits the kidney disease is administered or continued to be administered to the subject in an amount that is the same as or less than a standard dosage amount, and/or an RPL3L inhibitor is administered to the subject. When the subject has an RPL3L predicted loss-of-function polypeptide, the therapeutic agent that treats or inhibits the kidney disease is administered or continued to be administered to the subject in an amount that is the same as or less than a standard dosage amount, and/or an RPL3L inhibitor is administered to the subject. The presence of an RPL3L predicted loss-of-function polypeptide indicates the subject has a decreased risk of developing a kidney disease. In some embodiments, the subject has an RPL3L predicted loss-of-function polypeptide. In some embodiments, the subject does not have an RPL3L predicted loss-of-function polypeptide.

[0207] The present disclosure also provides methods of preventing a subject from developing a kidney disease by administering a therapeutic agent that prevents the kidney disease. In some embodiments, the method comprises determining whether the subject has an RPL3L predicted loss-of-function polypeptide by obtaining or having obtained a biological sample from the subject, and performing or having performed an assay on the biological sample to determine if the subject has an RPL3L predicted loss-of-function polypeptide. When the subject does not have an RPL3L predicted loss-of-function polypeptide, the therapeutic agent that prevents the kidney disease is administered or continued to be administered to the subject in an amount that is the same as or less than a standard dosage amount, and/or an RPL3L inhibitor is administered to the subject. When the subject has an RPL3L predicted loss-of-function polypeptide, the therapeutic agent that prevents the kidney disease is administered or continued to be administered to the subject in an amount that is the same as or less than a standard dosage amount, and/or an RPL3L inhibitor is administered to the subject. The presence of an RPL3L predicted loss-of-function polypeptide indicates the subject has a decreased risk of developing a kidney disease. In some embodiments, the subject has an RPL3L predicted loss-of-function polypeptide. In some embodiments, the subject does not have an RPL3L predicted loss-of-function polypeptide.

[0208] Detecting the presence or absence of an RPL3L predicted loss-of-function polypeptide in a biological sample from a subject and/or determining whether a subject has an RPL3L predicted loss-of-function polypeptide can be carried out by any of the methods described herein. In some embodiments, these methods can be carried out in vitro. In some embodiments, these methods can be carried out in situ. In some embodiments, these methods can be carried out in vivo. In any of these embodiments, the polypeptide can be present within a cell obtained from the subject.

[0209] In some embodiments, the RPL3L inhibitor is a small molecule. In some embodiments, the RPL3L inhibitor is an inhibitory nucleic acid molecule, such as an antisense molecule or an siRNA molecule.

[0210] The present disclosure also provides methods of treating a subject with a therapeutic agent that treats or inhibits a kidney disease, wherein the subject has a kidney disease. In some embodiments, the method comprises determining whether the subject has an SLC25A45 predicted loss-of-function polypeptide by obtaining or having obtained a biological sample from the subject, and performing or having performed an assay on the biological sample to determine if the subject has an SLC25A45 predicted loss-of-function polypeptide. When the subject does not have an SLC25A45 predicted loss-of-function polypeptide, the therapeutic agent that treats or inhibits the kidney disease is administered or continued to be administered to the subject in an amount that is the same as or less than a standard dosage amount, and/or an SLC25A45 inhibitor is administered to the subject. When the subject has an SLC25A45 predicted loss-of-function polypeptide, the therapeutic agent that treats or inhibits the kidney disease is administered or continued to be administered to the subject in an amount that is the same as or less than a standard dosage amount, and/or an SLC25A45 inhibitor is administered to the subject. The presence of an SLC25A45 predicted loss-of-function polypeptide indicates the subject has a decreased risk of developing a kidney disease. In some embodiments, the subject has an SLC25A45 predicted loss-of-function polypeptide. In some embodiments, the subject does not have an SLC25A45 predicted loss-of-function polypeptide.

[0211] The present disclosure also provides methods of preventing a subject from developing a kidney disease by administering a therapeutic agent that prevents the kidney disease. In some embodiments, the method comprises determining whether the subject has an SLC25A45 predicted loss-of-function polypeptide by obtaining or having obtained a biological sample from the subject, and performing or having performed an assay on the biological sample to determine if the subject has an SLC25A45 predicted loss-of-function polypeptide. When the subject does not have an SLC25A45 predicted loss-of-function polypeptide, the therapeutic agent that prevents the kidney disease is administered or continued to be administered to the subject in an amount that is the same as or less than a standard dosage amount, and/or an SLC25A45 inhibitor is administered to the subject. When the subject has an SLC25A45 predicted loss-of-function polypeptide, the therapeutic agent that prevents the kidney disease is administered or continued to be administered to the subject in an amount that is the same as or less than a standard dosage amount, and/or an SLC25A45 inhibitor is administered to the subject. The presence of an SLC25A45 predicted loss-of-function polypeptide indicates the subject has a decreased risk of developing a kidney disease. In some embodiments, the subject has an SLC25A45 predicted loss-of-function polypeptide. In some embodiments, the subject does not have an SLC25A45 predicted loss-of-function polypeptide.

[0212] Detecting the presence or absence of an SLC25A45 predicted loss-of-function polypeptide in a biological sample from a subject and/or determining whether a subject has an SLC25A45 predicted loss-of-function polypeptide can be carried out by any of the methods described herein. In some embodiments, these methods can be carried out in vitro. In some embodiments, these methods can be carried out in situ. In some embodiments, these methods can be carried out in vivo. In any of these embodiments, the polypeptide can be present within a cell obtained from the subject.

[0213] In some embodiments, the SLC25A45 inhibitor is a small molecule. In some embodiments, the SLC25A45 inhibitor is an inhibitory nucleic acid molecule, such as an antisense molecule or an siRNA molecule.

[0214] The present disclosure also provides methods of treating a subject with a therapeutic agent that treats or inhibits a kidney disease, wherein the subject has a kidney disease. In some embodiments, the method comprises determining whether the subject has an SLC7A9 predicted loss-of-function polypeptide by obtaining or having obtained a biological sample from the subject, and performing or having performed an assay on the biological sample to determine if the subject has an SLC7A9 predicted loss-of-function polypeptide. When the subject does not have an SLC7A9 predicted loss-of-function polypeptide, the therapeutic agent that treats or inhibits the kidney disease is administered or continued to be administered to the subject in an amount that is the same as or less than a standard dosage amount, and/or an SLC7A9 inhibitor is administered to the subject. When the subject has an SLC7A9 predicted loss-of-function polypeptide, the therapeutic agent that treats or inhibits the kidney disease is administered or continued to be administered to the subject in an amount that is the same as or less than a standard dosage amount, and/or an SLC7A9 inhibitor is administered to the subject. The presence of an SLC7A9 predicted loss-of-function polypeptide indicates the subject has a decreased risk of developing a kidney disease. In some embodiments, the subject has an SLC7A9 predicted loss-of-function polypeptide. In some embodiments, the subject does not have an SLC7A9 predicted loss-of-function polypeptide.

[0215] The present disclosure also provides methods of preventing a subject from developing a kidney disease by administering a therapeutic agent that prevents the kidney disease. In some embodiments, the method comprises determining whether the subject has an SLC7A9 predicted loss-of-function polypeptide by obtaining or having obtained a biological sample from the subject, and performing or having performed an assay on the biological sample to determine if the subject has an SLC7A9 predicted loss-of-function polypeptide. When the subject does not have an SLC7A9 predicted loss-of-function polypeptide, the therapeutic agent that prevents the kidney disease is administered or continued to be administered to the subject in an amount that is the same as or less than a standard dosage amount, and/or an SLC7A9 inhibitor is administered to the subject. When the subject has an SLC7A9 predicted loss-of-function polypeptide, the therapeutic agent that prevents the kidney disease is administered or continued to be administered to the subject in an amount that is the same as or less than a standard dosage amount, and/or an SLC7A9 inhibitor is administered to the subject. The presence of an SLC7A9 predicted loss-of-function polypeptide indicates the subject has a decreased risk of developing a kidney disease. In some embodiments, the subject has an SLC7A9 predicted loss-of-function polypeptide. In some embodiments, the subject does not have an SLC7A9 predicted loss-of-function polypeptide.

[0216] Detecting the presence or absence of an SLC7A9 predicted loss-of-function polypeptide in a biological sample from a subject and/or determining whether a subject has an SLC7A9 predicted loss-of-function polypeptide can be carried out by any of the methods described herein. In some embodiments, these methods can be carried out in vitro. In some embodiments, these methods can be carried out in situ. In some embodiments, these methods can be carried out in vivo. In any of these embodiments, the polypeptide can be present within a cell obtained from the subject.

[0217] In some embodiments, the SLC7A9 inhibitor is a small molecule. In some embodiments, the SLC7A9 inhibitor is dibutylyl adenosine 3′,5′-cyclic monophosphate (db-cAMP).

[0218] In any of the embodiments described herein, when the subject does not have any of ALDH1L1, ALDOB, G6PC, LRP2, RPL3L, SLC25A45, or SLC7A9 predicted loss-of-function polypeptides, the therapeutic agent that treats or inhibits a kidney disease is administered or continued to be administered to the subject in an amount that is the same as or less than a standard dosage amount, and/or a combination of one or more ALDH1L1 inhibitors, ALDOB inhibitors, G6PC inhibitors, LRP2 inhibitors, RPL3L inhibitors, SLC25A45 inhibitors, and/or SLC7A9 inhibitors, or any combination thereof, is administered to the subject. When the subject has one or more of ALDH1L1, ALDOB, G6PC, LRP2, RPL3L, SLC25A45, or SLC7A9 predicted loss-of-function polypeptides, the therapeutic agent that prevents a kidney disease is administered or continued to be administered to the subject in an amount that is the same as or less than a standard dosage amount. In addition, the subject may be administered a combination of one or more of ALDH1L1 inhibitors, ALDOB inhibitors, G6PC inhibitors, LRP2 inhibitors, RPL3L inhibitors, SLC25A45 inhibitors, or SLC7A9 inhibitors, wherein the combination comprises the inhibitors for the targets for which the subject is reference, i.e., lacks predicted loss-of-function polypeptides. For example, when the subject is determined to be ALDOB, G6PC, RPL3L, and SLC7A9 reference (i.e., the subject does not have ALDOB, G6PC, RPL3L, and SLC7A9 loss-of-function polypeptides) the subject is administered or continued to be administered the therapeutic agent that treats or inhibits the kidney disease in an amount that is the same as or less than a standard dosage amount and is administered a combination of an ALDOB inhibitor, a G6PC inhibitor, a RPL3L inhibitor, and an SLC7A9 inhibitor. In some embodiments, the subject is administered the combination of inhibitors that corresponds to any subset of ALDH1L1, ALDOB, G6PC, LRP2, RPL3L, SLC25A45, and SLC7A9 for which the subject was found to be reference or heterozygous for a variant nucleic acid molecule encoding corresponding loss-of-function polypeptides. The presence of one or more of ALDH1L1, ALDOB, G6PC, LRP2, RPL3L, SLC25A45, and/or SLC7A9 predicted loss-of-function polypeptides indicates the subject has a decreased risk of developing a kidney disease. The presence of a greater number of any of ALDH1L1, ALDOB, G6PC, LRP2, RPL3L, SLC25A45, and/or SLC7A9 predicted loss-of-function polypeptides is considered more protective of a kidney disease. Thus, having any four of ALDH1L1, ALDOB, G6PC, LRP2, RPL3L, SLC25A45, and SLC7A9 predicted loss-of-function polypeptides is more protective than having any three of ALDH1L1, ALDOB, G6PC, LRP2, RPL3L, SLC25A45, and SLC7A9 predicted loss-of-function polypeptides, which is, in turn, more protective than having any two of ALDH1L1, ALDOB, G6PC, LRP2, RPL3L, SLC25A45, and SLC7A9 predicted loss-of-function polypeptides. In some embodiments, the subject has one or more of ALDH1L1, ALDOB, G6PC, LRP2, RPL3L, SLC25A45, and/or SLC7A9 predicted loss-of-function polypeptides. In some embodiments, the subject does not have one or more of ALDH1L1, ALDOB, G6PC, LRP2, RPL3L, SLC25A45, and/or SLC7A9 predicted loss-of-function polypeptides.

[0219] Examples of therapeutic agents that treat or inhibit chronic kidney disease include, but are not limited to, erythropoietin, a diuretic (such as, for example, furosemide, bumetanide, ethacrynic acid, metolazone, and hydrochlorothiazide), a blood pressure medication, a phosphate binder, sodium bicarbonate, a cholesterol medication, and a gliflozin, or any combination thereof.

[0220] Examples of therapeutic agents that treat or inhibit a kidney stone include, but are not limited to, potassium citrate, a diuretic (such as, for example, furosemide, bumetanide, ethacrynic acid, metolazone, and hydrochlorothiazide), allopurinol, acetohydroxamic acid, tamsulosin, nifedipine, d-penicillamine, tiopronin, and mercaptopropionyl glycine, or any combination thereof.

[0221] Examples of therapeutic agents that treat or inhibit chronic glomerulonephritis include, but are not limited to, an angiotensin-converting enzyme (ACE) inhibitor (such as, for example, lisinopril, enalapril, captopril, benazepril, fosinopril, and quinapril), a diuretic (such as, for example, furosemide, bumetanide, ethacrynic acid, metolazone, and hydrochlorothiazide), a calcium channel blocker (such as, for example, amlodipine, nifedipine, felodipine, isradipine, verapamil, and diltiazem), a beta-adrenergic blocker (such as, for example, metoprolol, bisoprolol, esmolol, atenolol, propranolol, sotalol, labetalol, pindolol, and penbutolol), an alpha-adrenergic agonist (such as, for example, clonidine, tizanidine, and dexmedetomidine), a corticosteroid (such as, for example, prednisone), and an immunosuppressant (such as, for example, cyclosphosphamide), or any combination thereof.

[0222] Examples of therapeutic agents that treat or inhibit nephrosis include, but are not limited to, an ACE inhibitor (such as, for example, lisinopril, enalapril, captopril, benazepril, fosinopril, and quinapril), a diuretic (such as, for example, furosemide, bumetanide, ethacrynic acid, metolazone, and hydrochlorothiazide), a statin (such as, for example, atorvastatin, fluvastatin, lovastatin, pravastatin, rosuvastatin, and simvastatin), an angiotensin II receptor blockers (ARBs) (such as, for example, losartan and valsartan), an anticoagulant (such as, for example, heparin, warfarin, dabigatran, apixaban, and rivaroxaban), and an anti-inflammatory immunosuppressant (such as, for example, rituximab, cyclosporine, and cyclophosphamide), or any combination thereof.

[0223] Examples of therapeutic agents that treat or inhibit nephronophthisis include, but are not limited to, erythropoietin and a blood pressure medication, or any combination thereof.

[0224] Examples of therapeutic agents that treat or inhibit chronic interstitial nephritis include, but are not limited to, a corticosteroid, erythropoietin, a blood pressure medication, a statin, and a chelating agent (such as, for example, succimer and edetate calcium disodium), or a combination thereof.

[0225] Examples of therapeutic agents that treat or inhibit nephrosclerosis include, but are not limited to, a diuretic (such as, for example, furosemide, bumetanide, ethacrynic acid, metolazone, and hydrochlorothiazide), an ACE inhibitor (such as, for example, lisinopril, enalapril, captopril, benazepril, fosinopril, and quinapril), an ARB (such as, for example, losartan, and valsartan), a calcium channel blocker (such as, for example, amlodipine, nifedipine, felodipine, isradipine, verapamil, and diltiazem), a beta-adrenergic blocker (such as, for example, metoprolol, bisoprolol, esmolol, atenolol, propranolol, sotalol, labetalol, pindolol, and penbutolol), an alpha-adrenergic agonist (such as, for example, clonidine, tizanidine, and dexmedetomidine), a renin inhibitor (such as, for example, aliskiren), a vasodilator (such as, for example, minoxidil and hydralazine), and an alpha-1 blocker (such as, for example, doxazosin), or any combination thereof.

[0226] In some embodiments, the dose of the therapeutic agents that treat, prevent, or inhibit a kidney disease can be decreased by about 10%, by about 20%, by about 30%, by about 40%, by about 50%, by about 60%, by about 70%, by about 80%, or by about 90% for subjects that are heterozygous for one or more of ALDH1L1, ALDOB, G6PC, LRP2, RPL3L, SLC25A45, and/or SLC7A9 variant nucleic acid molecules encoding one or more ALDH1L1, ALDOB, G6PC, LRP2, RPL3L, SLC25A45, and/or SLC7A9 predicted loss-of-function polypeptides (i.e., a less than the standard dosage amount) compared to subjects that are reference for one or more of ALDH1L1, ALDOB, G6PC, LRP2, RPL3L, SLC25A45, and/or SLC7A9. In some embodiments, the dose of the therapeutic agents that treat, prevent, or inhibit a kidney disease can be decreased by about 10%, by about 20%, by about 30%, by about 40%, or by about 50%. In addition, the subjects that are heterozygous for one or more of ALDH1L1, ALDOB, G6PC, LRP2, RPL3L, SLC25A45, and/or SLC7A9 variant nucleic acid molecules encoding one or more of ALDH1L1, ALDOB, G6PC, LRP2, RPL3L, SLC25A45, and/or SLC7A9 predicted loss-of-function polypeptides can be administered less frequently compared to subjects that are ALDH1L1, ALDOB, G6PC, LRP2, RPL3L, SLC25A45, and SLC7A9 reference.

[0227] In some embodiments, the dose of the therapeutic agents that treat, prevent, or inhibit a kidney disease can be decreased by about 10%, by about 20%, by about 30%, by about 40%, by about 50%, for subjects that are homozygous for one or more of ALDH1L1, ALDOB, G6PC, LRP2, RPL3L, SLC25A45, and/or SLC7A9 variant nucleic acid molecules encoding one or more of ALDH1L1, ALDOB, G6PC, LRP2, RPL3L, SLC25A45, and/or SLC7A9 predicted loss-of-function polypeptides compared to subjects that are heterozygous for one or more of ALDH1L1, ALDOB, G6PC, LRP2, RPL3L, SLC25A45, and/or SLC7A9 variant nucleic acid molecules encoding one or more of ALDH1L1, ALDOB, G6PC, LRP2, RPL3L, SLC25A45, and/or SLC7A9 predicted loss-of-function polypeptides. In some embodiments, the dose of the therapeutic agents that treat, prevent, or inhibit a kidney disease can be decreased by about 10%, by about 20%, by about 30%, by about 40%, or by about 50%. In addition, the dose of therapeutic agents that treat, prevent, or inhibit a kidney disease in subjects that are homozygous for one or more of ALDH1L1, ALDOB, G6PC, LRP2, RPL3L, SLC25A45, and/or SLC7A9 variant nucleic acid molecules encoding one or more of ALDH1L1, ALDOB, G6PC, LRP2, RPL3L, SLC25A45, and/or SLC7A9 predicted loss-of-function polypeptides can be administered less frequently compared to subjects that are heterozygous for one or more of ALDH1L1, ALDOB, G6PC, LRP2, RPL3L, SLC25A45, and/or SLC7A9 variant nucleic acid molecule encoding one or more of ALDH1L1, ALDOB, G6PC, LRP2, RPL3L, SLC25A45, and/or SLC7A9 predicted loss-of-function polypeptides.

[0228] Administration of the therapeutic agents that treat, prevent, or inhibit a kidney disease and/or one or more of ALDH1L1, ALDOB, G6PC, LRP2, RPL3L, SLC25A45, and/or SLC7A9 inhibitors can be repeated, for example, after one day, two days, three days, five days, one week, two weeks, three weeks, one month, five weeks, six weeks, seven weeks, eight weeks, two months, or three months. The repeated administration can be at the same dose or at a different dose. The administration can be repeated once, twice, three times, four times, five times, six times, seven times, eight times, nine times, ten times, or more. For example, according to certain dosage regimens a subject can receive therapy for a prolonged period of time such as, for example, 6 months, 1 year, or more.

[0229] Administration of the therapeutic agents that treat, prevent, or inhibit a kidney disease and/or one or more of ALDH1L1, ALDOB, G6PC, LRP2, RPL3L, SLC25A45, and/or SLC7A9 inhibitors can occur by any suitable route including, but not limited to, parenteral, intravenous, oral, subcutaneous, intra-arterial, intracranial, intrathecal, intraperitoneal, topical, intranasal, or intramuscular. Pharmaceutical compositions for administration are desirably sterile and substantially isotonic and manufactured under GMP conditions. Pharmaceutical compositions can be provided in unit dosage form (i.e., the dosage for a single administration). Pharmaceutical compositions can be formulated using one or more physiologically and pharmaceutically acceptable carriers, diluents, excipients or auxiliaries. The formulation depends on the route of administration chosen. The term “pharmaceutically acceptable” means that the carrier, diluent, excipient, or auxiliary is compatible with the other ingredients of the formulation and not substantially deleterious to the recipient thereof.

[0230] The terms “treat”, “treating”, and “treatment” and “prevent”, “preventing”, and “prevention” as used herein, refer to eliciting the desired biological response, such as a therapeutic and prophylactic effect, respectively. In some embodiments, a therapeutic effect comprises one or more of a decrease/reduction in kidney disease, a decrease/reduction in the severity of kidney disease (such as, for example, a reduction or inhibition of development of kidney disease), a decrease/reduction in symptoms and kidney disease-related effects, delaying the onset of symptoms and kidney disease-related effects, reducing the severity of symptoms of kidney disease-related effects, reducing the number of symptoms and kidney disease-related effects, reducing the latency of symptoms and kidney disease-related effects, an amelioration of symptoms and kidney disease-related effects, reducing secondary symptoms, reducing secondary infections, preventing relapse to kidney disease, decreasing the number or frequency of relapse episodes, increasing latency between symptomatic episodes, increasing time to sustained progression, speeding recovery, or increasing efficacy of or decreasing resistance to alternative therapeutics, and/or an increased survival time of the affected host animal, following administration of the agent or composition comprising the agent. A prophylactic effect may comprise a complete or partial avoidance/inhibition or a delay of kidney disease development/progression (such as, for example, a complete or partial avoidance/inhibition or a delay), and an increased survival time of the affected host animal, following administration of a therapeutic protocol. Treatment of kidney disease encompasses the treatment of a subject already diagnosed as having any form of kidney disease at any clinical stage or manifestation, the delay of the onset or evolution or aggravation or deterioration of the symptoms or signs of kidney disease, and/or preventing and/or reducing the severity of kidney disease.

[0231] The present disclosure also provides methods of identifying a subject having an increased risk of developing a kidney disease. In some embodiments, the method comprises determining or having determined in a biological sample obtained from the subject the presence or absence of one or more of ALDH1L1, ALDOB, G6PC, LRP2, RPL3L, SLC25A45, and/or SLC7A9 variant nucleic acid molecules (such as a genomic nucleic acid molecule, mRNA molecule, and/or cDNA molecule) encoding one or more of ALDH1L1, ALDOB, G6PC, LRP2, RPL3L, SLC25A45, and/or SLC7A9 predicted loss-of-function polypeptides. When the subject lacks ALDH1L1, ALDOB, G6PC, LRP2, RPL3L, SLC25A45, and SLC7A9 variant nucleic acid molecules encoding ALDH1L1, ALDOB, G6PC, LRP2, RPL3L, SLC25A45, and SLC7A9 predicted loss-of-function polypeptides (i.e., the subject is genotypically categorized as ALDH1L1, ALDOB, G6PC, LRP2, RPL3L, SLC25A45, and SLC7A9 reference), then the subject has an increased risk of developing a kidney disease. When the subject has one or more of ALDH1L1, ALDOB, G6PC, LRP2, RPL3L, SLC25A45, and SLC7A9 variant nucleic acid molecules encoding one or more of ALDH1L1, ALDOB, G6PC, LRP2, RPL3L, SLC25A45, and/or SLC7A9 predicted loss-of-function polypeptides (i.e., the subject is heterozygous or homozygous for one or more of ALDH1L1, ALDOB, G6PC, LRP2, RPL3L, SLC25A45, and/or SLC7A9 variant nucleic acid molecules encoding one or more of ALDH1L1, ALDOB, G6PC, LRP2, RPL3L, SLC25A45, and/or SLC7A9 predicted loss-of-function polypeptides), then the subject has a decreased risk of developing a kidney disease.

[0232] Having a single copy of any one of ALDH1L1, ALDOB, G6PC, LRP2, RPL3L, SLC25A45, and SLC7A9 variant nucleic acid molecules encoding any one of ALDH1L1, ALDOB, G6PC, LRP2, RPL3L, SLC25A45, and SLC7A9 predicted loss-of-function polypeptides is more protective of a subject from developing a kidney disease than having no copies of an ALDH1L1, ALDOB, G6PC, LRP2, RPL3L, SLC25A45, and/or SLC7A9 variant nucleic acid molecules encoding ALDH1L1, ALDOB, G6PC, LRP2, RPL3L, SLC25A45, and/or SLC7A9 predicted loss-of-function polypeptides. Without intending to be limited to any particular theory or mechanism of action, it is believed that a single copy of any one of ALDH1L1, ALDOB, G6PC, LRP2, RPL3L, SLC25A45, and/or SLC7A9 variant nucleic acid molecules encoding ALDH1L1, ALDOB, G6PC, LRP2, RPL3L, SLC25A45, and/or SLC7A9 predicted loss-of-function polypeptides (i.e., heterozygous for one or more of ALDH1L1, ALDOB, G6PC, LRP2, RPL3L, SLC25A45, and/or SLC7A9 variant nucleic acid molecules encoding one or more of ALDH1L1, ALDOB, G6PC, LRP2, RPL3L, SLC25A45, and/or SLC7A9 predicted loss-of-function polypeptides) is protective of a subject from developing a kidney disease, and it is also believed that having two copies of any one of ALDH1L1, ALDOB, G6PC, LRP2, RPL3L, SLC25A45, and/or SLC7A9 variant nucleic acid molecules encoding ALDH1L1, ALDOB, G6PC, LRP2, RPL3L, SLC25A45, and/or SLC7A9 predicted loss-of-function polypeptides (i.e., homozygous for one or more of ALDH1L1, ALDOB, G6PC, LRP2, RPL3L, SLC25A45, and/or SLC7A9 variant nucleic acid molecules encoding one or more of ALDH1L1, ALDOB, G6PC, LRP2, RPL3L, SLC25A45, and/or SLC7A9 predicted loss-of-function polypeptides) may be more protective of a subject from developing a kidney disease, relative to a subject with a single copy of the corresponding gene. Thus, in some embodiments, a single copy of any one of ALDH1L1, ALDOB, G6PC, LRP2, RPL3L, SLC25A45, and SLC7A9 variant nucleic acid molecules encoding any one of ALDH1L1, ALDOB, G6PC, LRP2, RPL3L, SLC25A45, and SLC7A9 predicted loss-of-function polypeptides may not be completely protective, but instead, may be partially or incompletely protective of a subject from developing a kidney disease. While not desiring to be bound by any particular theory, there may be additional factors or molecules involved in the development of a kidney disease that are still present in a subject having a single copy of any one of ALDH1L1, ALDOB, G6PC, LRP2, RPL3L, SLC25A45, and/or SLC7A9 variant nucleic acid molecule encoding any one of ALDH1L1, ALDOB, G6PC, LRP2, RPL3L, SLC25A45, and SLC7A9 predicted loss-of-function polypeptide, thus resulting in less than complete protection from the development of a kidney disease.

[0233] Determining whether a subject has one or more of ALDH1L1, ALDOB, G6PC, LRP2, RPL3L, SLC25A45, and/or SLC7A9 variant nucleic acid molecule encoding one or more of ALDH1L1, ALDOB, G6PC, LRP2, RPL3L, SLC25A45, and/or SLC7A9 predicted loss-of-function polypeptides in a biological sample from a subject and/or determining whether a subject has one or more of ALDH1L1, ALDOB, G6PC, LRP2, RPL3L, SLC25A45, and/or SLC7A9 variant nucleic acid molecules encoding one or more of ALDH1L1, ALDOB, G6PC, LRP2, RPL3L, SLC25A45, and/or SLC7A9 predicted loss-of-function polypeptides can be carried out by any of the methods described herein. In some embodiments, these methods can be carried out in vitro. In some embodiments, these methods can be carried out in situ. In some embodiments, these methods can be carried out in vivo. In any of these embodiments, the nucleic acid molecule can be present within a cell obtained from the subject.

[0234] In some embodiments, when a subject is identified as having an increased risk of developing a kidney disease, the subject is administered a therapeutic agent that treats, prevents, or inhibits a kidney disease, and/or one or more ALDH1L1 inhibitors, ALDOB inhibitors, G6PC inhibitors, LRP2 inhibitors, RPL3L inhibitors, SLC25A45 inhibitors, and/or SLC7A9 inhibitors, or any combination thereof, as described herein.

[0235] For example, when the subject is ALDH1L1 reference, and therefore has an increased risk of developing a kidney disease, the subject is administered an ALDH1L1 inhibitor. In some embodiments, such a subject is also administered a therapeutic agent that treats, prevents, or inhibits a kidney disease. In some embodiments, when the subject is heterozygous for an ALDH1L1 variant nucleic acid molecule encoding an ALDH1L1 predicted loss-of-function polypeptide, the subject is administered the therapeutic agent that treats, prevents, or inhibits a kidney disease in a dosage amount that is the same as or less than a standard dosage amount, and is also administered an ALDH1L1 inhibitor. In some embodiments, such a subject is also administered a therapeutic agent that treats, prevents, or inhibits a kidney disease. In some embodiments, when the subject is homozygous for an ALDH1L1 variant nucleic acid molecule encoding an ALDH1L1 predicted loss-of-function polypeptide, the subject is administered the therapeutic agent that treats, prevents, or inhibits a kidney disease in a standard dosage amount. In some embodiments, the subject is ALDH1L1 reference. In some embodiments, the subject is heterozygous for an ALDH1L1 variant nucleic acid molecule encoding an ALDH1L1 predicted loss-of-function polypeptide. In some embodiments, the subject is homozygous for an ALDH1L1 variant nucleic acid molecule encoding an ALDH1L1 predicted loss-of-function polypeptide.

[0236] In addition, when the subject is ALDOB reference, and therefore has an increased risk of developing a kidney disease, the subject is administered an ALDOB inhibitor. In some embodiments, such a subject is also administered a therapeutic agent that treats, prevents, or inhibits a kidney disease. In some embodiments, when the subject is heterozygous for an ALDOB variant nucleic acid molecule encoding an ALDOB predicted loss-of-function polypeptide, the subject is administered the therapeutic agent that treats, prevents, or inhibits a kidney disease in a dosage amount that is the same as or less than a standard dosage amount, and is also administered an ALDOB inhibitor. In some embodiments, such a subject is also administered a therapeutic agent that treats, prevents, or inhibits a kidney disease. In some embodiments, when the subject is homozygous for an ALDOB variant nucleic acid molecule encoding an ALDOB predicted loss-of-function polypeptide, the subject is administered the therapeutic agent that treats, prevents, or inhibits a kidney disease in a standard dosage amount. In some embodiments, the subject is ALDOB reference. In some embodiments, the subject is heterozygous for an ALDOB variant nucleic acid molecule encoding an ALDOB predicted loss-of-function polypeptide. In some embodiments, the subject is homozygous for an ALDOB variant nucleic acid molecule encoding an ALDOB predicted loss-of-function polypeptide.

[0237] In addition, when the subject is ALDH1L1 reference, and therefore has an increased risk of developing a kidney disease, the subject is administered an ALDH1L1 inhibitor. In some embodiments, such a subject is also administered a therapeutic agent that treats, prevents, or inhibits a kidney disease. In some embodiments, when the subject is heterozygous for an ALDH1L1 variant nucleic acid molecule encoding an ALDH1L1 predicted loss-of-function polypeptide, the subject is administered the therapeutic agent that treats, prevents, or inhibits a kidney disease in a dosage amount that is the same as or less than a standard dosage amount, and is also administered an ALDH1L1 inhibitor. In some embodiments, such a subject is also administered a therapeutic agent that treats, prevents, or inhibits a kidney disease. In some embodiments, when the subject is homozygous for an ALDH1L1 variant nucleic acid molecule encoding an ALDH1L1 predicted loss-of-function polypeptide, the subject is administered the therapeutic agent that treats, prevents, or inhibits a kidney disease in a standard dosage amount. In some embodiments, the subject is ALDH1L1 reference. In some embodiments, the subject is heterozygous for an ALDH1L1 variant nucleic acid molecule encoding an ALDH1L1 predicted loss-of-function polypeptide. In some embodiments, the subject is homozygous for an ALDH1L1 variant nucleic acid molecule encoding an ALDH1L1 predicted loss-of-function polypeptide.

[0238] In addition, when the subject is LRP2 reference, and therefore has an increased risk of developing a kidney disease, the subject is administered an LRP2 inhibitor. In some embodiments, such a subject is also administered a therapeutic agent that treats, prevents, or inhibits a kidney disease. In some embodiments, when the subject is heterozygous for an LRP2 variant nucleic acid molecule encoding an LRP2 predicted loss-of-function polypeptide, the subject is administered the therapeutic agent that treats, prevents, or inhibits a kidney disease in a dosage amount that is the same as or less than a standard dosage amount, and is also administered an LRP2 inhibitor. In some embodiments, such a subject is also administered a therapeutic agent that treats, prevents, or inhibits a kidney disease. In some embodiments, when the subject is homozygous for an LRP2 variant nucleic acid molecule encoding an LRP2 predicted loss-of-function polypeptide, the subject is administered the therapeutic agent that treats, prevents, or inhibits a kidney disease in a standard dosage amount. In some embodiments, the subject is LRP2 reference. In some embodiments, the subject is heterozygous for an LRP2 variant nucleic acid molecule encoding an LRP2 predicted loss-of-function polypeptide. In some embodiments, the subject is homozygous for an LRP2 variant nucleic acid molecule encoding an LRP2 predicted loss-of-function polypeptide.

[0239] In addition, when the subject is RPL3L reference, and therefore has an increased risk of developing a kidney disease, the subject is administered an RPL3L inhibitor. In some embodiments, such a subject is also administered a therapeutic agent that treats, prevents, or inhibits a kidney disease. In some embodiments, when the subject is heterozygous for an RPL3L variant nucleic acid molecule encoding an RPL3L predicted loss-of-function polypeptide, the subject is administered the therapeutic agent that treats, prevents, or inhibits a kidney disease in a dosage amount that is the same as or less than a standard dosage amount, and is also administered an RPL3L inhibitor. In some embodiments, such a subject is also administered a therapeutic agent that treats, prevents, or inhibits a kidney disease. In some embodiments, when the subject is homozygous for an RPL3L variant nucleic acid molecule encoding an RPL3L predicted loss-of-function polypeptide, the subject is administered the therapeutic agent that treats, prevents, or inhibits a kidney disease in a standard dosage amount. In some embodiments, the subject is RPL3L reference. In some embodiments, the subject is heterozygous for an RPL3L variant nucleic acid molecule encoding an RPL3L predicted loss-of-function polypeptide. In some embodiments, the subject is homozygous for an RPL3L variant nucleic acid molecule encoding an RPL3L predicted loss-of-function polypeptide.

[0240] In addition, when the subject is SLC25A45 reference, and therefore has an increased risk of developing a kidney disease, the subject is administered an SLC25A45 inhibitor. In some embodiments, such a subject is also administered a therapeutic agent that treats, prevents, or inhibits a kidney disease. In some embodiments, when the subject is heterozygous for an SLC25A45 variant nucleic acid molecule encoding an SLC25A45 predicted loss-of-function polypeptide, the subject is administered the therapeutic agent that treats, prevents, or inhibits a kidney disease in a dosage amount that is the same as or less than a standard dosage amount, and is also administered an SLC25A45 inhibitor. In some embodiments, such a subject is also administered a therapeutic agent that treats, prevents, or inhibits a kidney disease. In some embodiments, when the subject is homozygous for an SLC25A45 variant nucleic acid molecule encoding an SLC25A45 predicted loss-of-function polypeptide, the subject is administered the therapeutic agent that treats, prevents, or inhibits a kidney disease in a standard dosage amount. In some embodiments, the subject is SLC25A45 reference. In some embodiments, the subject is heterozygous for an SLC25A45 variant nucleic acid molecule encoding an SLC25A45 predicted loss-of-function polypeptide. In some embodiments, the subject is homozygous for an SLC25A45 variant nucleic acid molecule encoding an SLC25A45 predicted loss-of-function polypeptide.

[0241] In addition, when the subject is SLC7A9 reference, and therefore has an increased risk of developing a kidney disease, the subject is administered an SLC7A9 inhibitor. In some embodiments, such a subject is also administered a therapeutic agent that treats, prevents, or inhibits a kidney disease. In some embodiments, when the subject is heterozygous for an SLC7A9 variant nucleic acid molecule encoding an SLC7A9 predicted loss-of-function polypeptide, the subject is administered the therapeutic agent that treats, prevents, or inhibits a kidney disease in a dosage amount that is the same as or less than a standard dosage amount, and is also administered an SLC7A9 inhibitor. In some embodiments, such a subject is also administered a therapeutic agent that treats, prevents, or inhibits a kidney disease. In some embodiments, when the subject is homozygous for an SLC7A9 variant nucleic acid molecule encoding an SLC7A9 predicted loss-of-function polypeptide, the subject is administered the therapeutic agent that treats, prevents, or inhibits a kidney disease in a standard dosage amount. In some embodiments, the subject is SLC7A9 reference. In some embodiments, the subject is heterozygous for an SLC7A9 variant nucleic acid molecule encoding an SLC7A9 predicted loss-of-function polypeptide. In some embodiments, the subject is homozygous for an SLC7A9 variant nucleic acid molecule encoding an SLC7A9 predicted loss-of-function polypeptide.

[0242] In some embodiments, any of the methods described herein can further comprise determining the subject's aggregate gene burden of having ALDH1L1 variant nucleic acid molecules encoding ALDH1L1 predicted loss-of-function polypeptides associated with a decreased risk of developing a kidney disease. The aggregate gene burden is the sum of all variants in the ALDH1L1 gene, which can be carried out in an association analysis with a kidney disease. In some embodiments, the subject is homozygous for one or more ALDH1L1 variant nucleic acid molecules encoding ALDH1L1 predicted loss-of-function polypeptides associated with a decreased risk of developing a kidney disease. In some embodiments, the subject is heterozygous for one or more ALDH1L1 variant nucleic acid molecules encoding ALDH1L1 predicted loss-of-function polypeptides associated with a decreased risk of developing a kidney disease. The result of the association analysis suggests that ALDH1L1 variant nucleic acid molecules encoding ALDH1L1 predicted loss-of-function polypeptides are associated with decreased risk of developing a kidney disease. When the subject has a lower aggregate gene burden, the subject is at a higher risk of developing a kidney disease and the subject is administered or continued to be administered a therapeutic agent that treats, prevents, or inhibits a kidney disease in an amount that is the same as or less than a standard dosage amount, and/or an ALDH1L1 inhibitor. When the subject has a greater aggregate gene burden, the subject is at a lower risk of developing a kidney disease and the subject is administered or continued to be administered a therapeutic agent that treats, prevents, or inhibits a kidney disease in a standard dosage amount. The greater the aggregate gene burden, the lower the risk of developing a kidney disease.

[0243] ALDH1L1 pLOF variants include, but are not limited to: 3:126107153:CGA:C, 3:126112779:T:TA, 3:126112781:C:A, 3:126112817:C:A, 3:126114556:C:A, 3:126114556:C:G, 3:126118050:AT:A, 3:126118099:C:T, 3:126118100:T:C, 3:126130224:CA:C, 3:126136803:GC:G, 3:126136822:TC:T, 3:126137812:C:T, 3:126137851:G:A, 3:126150513:G:A, 3:126153567:GA:G, 3:126154620:C:T, 3:126154635:C:T, 3:126155464:TG:T, 3:126157473:GA:G, 3:126157482:CCT:C, 3:126157508:C:T, 3:126158403:AC:A, 3:126158415:C:A, 3:126158427:G:A, 3:126105750:G:A, 3:126112829:G:A, 3:126114599:GA:G, 3:126114658:T:A, 3:126118009:T:A, 3:126125615:C:A, 3:126136822:T:TC, 3:126137961:C:A, 3:126154553:C:T, 3:126157463:C:T, 3:126158477:GC:G, 3:126158641:T:C, 3:126160978:A:T, 3:126180961:C:A, 3:126180967:A:T, 3:126103829:C:A, 3:126105744:CA:C, 3:126105773:GC:G, 3:126105870:CA:C, 3:126105927:T:C, 3:126110004:G:A, 3:126112805:GA:G, 3:126112853:CT:C, 3:126112881:C:G, 3:126114556:C:T, 3:126118045:AC:A, 3:126118074:G:C, 3:126118075:AG:A, 3:126118099:CT:C, 3:126124453:T:C, 3:126125719:A:AC, 3:126125722:C:G, 3:126130244:A:T, 3:126130272:G:A, 3:126130295:T:C, 3:126131536:T:C, 3:126135534:C:T, 3:126135572:T:TC, 3:126136763:C:T, 3:126136763:C:G, 3:126136823:C:A, 3:126136848:C:CA, 3:126136885:T:C, 3:126137872:G:A, 3:126146834:C:T, 3:126146915:CT:C, 3:126146917:G:A, 3:126150403:T:TA, 3:126153495:TG:T, 3:126153510:T:TG, 3:126154645:T:G, 3:126155427:CCCTCATA:C, 3:126155446:C:A, 3:126155464:T:TG, 3:126155500:G:A, 3:126157341:A:G, 3:126157426:G:A, 3:126158403:A:G, 3:126158404:C:T, 3:126158471:C:CG, 3:126158523:C:CGTTG, 3:126158560:CA:C, 3:126158590:C:T, 3:126158617:TC:T, 3:126160852:C:T, 3:126160855:AG:A, 3:126160866:C:CT, 3:126161003:C:G, 3:126161004:T:A, 3:126180474:A:G, and 3:126180967:A:G (according to the GRCh38/hg38 human genome assembly).

[0244] ALDH1L1 pLOF or missense variants predicted to be deleterious by 5 out of 5, respectively, in silico prediction algorithms AAF<1% include, but are not limited to: 3:126103820:G:A, 3:126105751:T:A, 3:126105752:T:C, 3:126105758:C:A, 3:126105777:C:T, 3:126105787:G:T, 3:126105791:T:A, 3:126105816:C:T, 3:126105822:G:A, 3:126105831:T:C, 3:126105869:C:A, 3:126105876:C:A, 3:126105896:T:C, 3:126105924:C:A, 3:126107153:CGA:C, 3:126107154:G:A, 3:126107172:G:A, 3:126107180:G:A, 3:126107201:A:T, 3:126107214:C:T, 3:126107222:A:G, 3:126107241:A:G, 3:126109965:C:T, 3:126109982:G:A, 3:126109985:C:T, 3:126110031:G:A, 3:126110055:G:C, 3:126112779:T:TA, 3:126112781:C:A, 3:126112807:A:G, 3:126112817:C:A, 3:126114556:C:G, 3:126114556:C:A, 3:126114567:G:A, 3:126118043:G:C, 3:126118047:C:T, 3:126118048:C:T, 3:126118050:AT:A, 3:126118069:G:T, 3:126118087:C:A, 3:126118099:C:T, 3:126118100:T:C, 3:126124372:G:A, 3:126124372:G:T, 3:126124403:C:T, 3:126124438:G:A, 3:126124447:G:T, 3:126124451:C:T, 3:126125623:G:A, 3:126125624:G:T, 3:126125645:C:T, 3:126125650:G:C, 3:126125656:C:T, 3:126125678:G:C, 3:126130224:CA:C, 3:126130257:G:A, 3:126131415:C:G, 3:126131416:G:A, 3:126131421:G:A, 3:126131422:T:A, 3:126131434:T:C, 3:126131436:C:A, 3:126131460:G:A, 3:126131475:G:A, 3:126131490:A:G, 3:126131491:T:C, 3:126131527:C:T, 3:126135551:C:T, 3:126135553:C:T, 3:126135554:G:A, 3:126135559:C:T, 3:126135560:G:A, 3:126135562:G:A, 3:126135563:C:T, 3:126135577:C:G, 3:126135617:C:T, 3:126136803:GC:G, 3:126136822:TC:T, 3:126136831:A:G, 3:126136883:C:T, 3:126137812:C:T, 3:126137851:G:A, 3:126137920:A:T, 3:126146842:C:T, 3:126146844:T:C, 3:126146845:C:T, 3:126146865:T:C, 3:126146880:G:A, 3:126146913:C:T, 3:126146914:G:A, 3:126150511:C:A, 3:126150513:G:A, 3:126153567:GA:G, 3:126154582:G:A, 3:126154592:C:T, 3:126154600:C:T, 3:126154601:G:A, 3:126154620:C:T, 3:126154635:C:T, 3:126155440:C:T, 3:126155464:TG:T, 3:126155496:G:T, 3:126157400:G:T, 3:126157416:C:G, 3:126157441:C:T, 3:126157473:GA:G, 3:126157482:CCT:C, 3:126157495:C:T, 3:126157500:A:T, 3:126157508:C:T, 3:126158403:AC:A, 3:126158412:T:C, 3:126158415:C:A, 3:126158417:G:A, 3:126158421:C:T, 3:126158423:C:T, 3:126158426:C:T, 3:126158427:G:A, 3:126158447:G:A, 3:126158523:C:T, 3:126158529:G:A, 3:126158532:C:T, 3:126158535:C:T, 3:126158538:C:T, 3:126158588:C:T, 3:126158589:G:A, 3:126158595:G:A, 3:126158597:G:C, 3:126158602:C:A, 3:126158621:T:C, 3:126158623:C:A, 3:126160860:G:T, 3:126160862:C:T, 3:126160883:G:A, 3:126160901:C:T, 3:126160912:C:T, 3:126160945:C:T, 3:126160954:C:T, 3:126160970:C:T, 3:126103799:C:G, 3:126103829:C:G, 3:126105750:G:A, 3:126105765:A:G, 3:126105768:G:C, 3:126105771:C:T, 3:126105780:C:T, 3:126105786:T:G, 3:126105794:G:A, 3:126105794:G:T, 3:126105861:T:A, 3:126105895:A:T, 3:126105902:C:G, 3:126105903:G:A, 3:126107163:T:A, 3:126107175:C:T, 3:126107228:G:T, 3:126107237:A:G, 3:126109950:G:A, 3:126109968:C:T, 3:126109968:C:G, 3:126110020:C:G, 3:126110060:G:A, 3:126112798:T:C, 3:126112829:G:A, 3:126112870:G:A, 3:126114579:T:A, 3:126114582:C:A, 3:126114599:GA:G, 3:126114641:G:T, 3:126114658:T:A, 3:126118009:T:A, 3:126118063:C:T, 3:126118083:T:A, 3:126124421:C:T, 3:126124424:C:A, 3:126125615:C:A, 3:126125636:C:T, 3:126125638:G:A, 3:126130257:G:C, 3:126131390:C:G, 3:126131394:T:C, 3:126131437:C:T, 3:126131463:T:C, 3:126131484:G:A, 3:126131487:T:A, 3:126131488:C:T, 3:126135535:C:A, 3:126135557:C:T, 3:126135568:A:T, 3:126135596:C:T, 3:126135629:C:T, 3:126136810:G:T, 3:126136822:T:TC, 3:126136847:G:A, 3:126137881:C:T, 3:126137928:C:A, 3:126137940:T:C, 3:126137952:T:G, 3:126137961:C:A, 3:126146839:C:T, 3:126146854:C:T, 3:126150408:G:A, 3:126150443:A:C, 3:126150443:A:T, 3:126150503:T:A, 3:126153484:G:A, 3:126153496:G:A, 3:126153500:G:A, 3:126154553:C:T, 3:126154577:C:T, 3:126154598:C:T, 3:126155413:C:T, 3:126155433:T:C, 3:126155436:G:A, 3:126155439:G:T, 3:126155475:C:T, 3:126155476:C:T, 3:126155503:C:T, 3:126157371:A:G, 3:126157375:G:T, 3:126157375:G:A, 3:126157380:T:C, 3:126157395:G:A, 3:126157424:C:G, 3:126157438:C:T, 3:126157458:T:A, 3:126157459:C:T, 3:126157463:C:T, 3:126157464:C:G, 3:126157483:C:G, 3:126157494:C:G, 3:126158475:G:T, 3:126158477:GC:G, 3:126158491:C:T, 3:126158492:A:G, 3:126158496:G:T, 3:126158517:G:A, 3:126158526:T:G, 3:126158639:C:A, 3:126158641:T:C, 3:126160898:C:G, 3:126160951:A:G, 3:126160954:C:A, 3:126160957:T:C, 3:126160978:A:T, 3:126180961:C:A, 3:126180967:A:T, 3:126103810:G:A, 3:126103820:G:C, 3:126103829:C:A, 3:126103831:T:C, 3:126103846:C:T, 3:126105744:CA:C, 3:126105744:C:G, 3:126105748:C:A, 3:126105762:C:T, 3:126105773:GC:G, 3:126105785:T:C, 3:126105787:G:C, 3:126105795:T:C, 3:126105796:G:C, 3:126105798:T:G, 3:126105802:A:C, 3:126105806:A:T, 3:126105821:A:G, 3:126105855:C:G, 3:126105855:C:A, 3:126105870:CA:C, 3:126105872:G:T, 3:126105887:T:G, 3:126105890:G:A, 3:126105918:C:T, 3:126105927:T:C, 3:126107142:C:G, 3:126107165:A:G, 3:126107175:C:G, 3:126107202:T:C, 3:126107204:T:C, 3:126107231:G:C, 3:126107231:G:A, 3:126107246:C:G, 3:126107246:C:T, 3:126109944:C:T, 3:126109949:C:A, 3:126109949:C:G, 3:126109989:C:T, 3:126110004:G:A, 3:126110041:A:C, 3:126110051:C:T, 3:126110052:C:T, 3:126110054:T:C, 3:126110055:G:A, 3:126110067:T:C, 3:126110075:G:A, 3:126112783:A:C, 3:126112784:C:T, 3:126112793:C:T, 3:126112805:GA:G, 3:126112831:C:G, 3:126112849:T:G, 3:126112852:C:T, 3:126112853:CT:C, 3:126112859:T:A, 3:126112881:C:G, 3:126114556:C:T, 3:126114577:G:A, 3:126114594:A:T, 3:126114604:G:A, 3:126114615:C:T, 3:126114616:C:T, 3:126114624:A:G, 3:126114627:G:C, 3:126114632:C:A, 3:126114633:T:G, 3:126114633:T:A, 3:126114634:T:C, 3:126118011:A:C, 3:126118024:C:T, 3:126118035:G:A, 3:126118038:C:G, 3:126118045:AC:A, 3:126118056:C:T, 3:126118074:G:C, 3:126118075:AG:A, 3:126118083:T:G, 3:126118087:C:T, 3:126118098:C:G, 3:126118099:CT:C, 3:126124369:C:A, 3:126124369:C:T, 3:126124375:A:G, 3:126124378:A:T, 3:126124381:T:G, 3:126124382:T:G, 3:126124390:C:T, 3:126124391:C:T, 3:126124415:T:G, 3:126124426:A:G, 3:126124442:G:A, 3:126124447:G:A, 3:126124453:T:C, 3:126125626:T:A, 3:126125639:T:C, 3:126125639:T:G, 3:126125648:C:A, 3:126125654:G:C, 3:126125657:A:T, 3:126125677:A:G, 3:126125702:G:A, 3:126125716:C:G, 3:126125719:A:AC, 3:126125720:C:A, 3:126125722:C:G, 3:126130226:A:G, 3:126130230:G:T, 3:126130244:A:T, 3:126130251:G:C, 3:126130257:G:T, 3:126130272:G:A, 3:126130292:C:A, 3:126130295:T:C, 3:126131385:T:C, 3:126131391:T:G, 3:126131397:C:T, 3:126131404:C:T, 3:126131416:G:C, 3:126131416:G:T, 3:126131421:G:T, 3:126131433:A:T, 3:126131441:G:C, 3:126131442:T:A, 3:126131472:C:T, 3:126131493:G:A, 3:126131499:A:C, 3:126131517:T:C, 3:126131534:C:A, 3:126131536:T:C, 3:126135534:C:T, 3:126135548:G:A, 3:126135550:C:A, 3:126135551:C:A, 3:126135562:G:T, 3:126135568:A:C, 3:126135572:T:TC, 3:126135577:C:A, 3:126135578:A:G, 3:126135595:G:C, 3:126135595:G:A, 3:126135604:G:A, 3:126135625:A:T, 3:126136763:C:T, 3:126136763:C:G, 3:126136781:T:G, 3:126136823:C:A, 3:126136832:T:A, 3:126136848:C:CA, 3:126136885:T:C, 3:126137814:T:C, 3:126137815:A:C, 3:126137842:C:A, 3:126137847:C:T, 3:126137853:A:G, 3:126137871:T:C, 3:126137872:G:A, 3:126137886:A:C, 3:126137886:A:G, 3:126137895:G:A, 3:126137904:A:G, 3:126137907:T:C, 3:126137952:T:C, 3:126146834:C:T, 3:126146835:C:A, 3:126146836:T:C, 3:126146838:A:C, 3:126146847:A:C, 3:126146853:G:A, 3:126146857:C:A, 3:126146857:C:T, 3:126146869:A:G, 3:126146875:C:T, 3:126146889:A:G, 3:126146908:G:T, 3:126146911:T:C, 3:126146915:CT:C, 3:126146917:G:A, 3:126150403:T:TA, 3:126150450:G:A, 3:126150474:A:T, 3:126150493:C:A, 3:126150500:C:T, 3:126150525:C:T, 3:126153454:T:G, 3:126153455:C:A, 3:126153461:C:T, 3:126153473:G:A, 3:126153487:A:C, 3:126153493:C:T, 3:126153494:C:T, 3:126153494:C:A, 3:126153495:TG:T, 3:126153510:T:TG, 3:126153520:A:G, 3:126153564:G:T, 3:126153568:A:G, 3:126153577:A:T, 3:126154555:T:C, 3:126154600:C:G, 3:126154601:G:T, 3:126154610:T:A, 3:126154625:C:T, 3:126154637:A:G, 3:126154638:G:T, 3:126154641:G:C, 3:126154645:T:G, 3:126155427:CCCTCATA:C, 3:126155431:C:T, 3:126155434:A:G, 3:126155446:C:A, 3:126155464:T:TG, 3:126155464:T:C, 3:126155482:C:G, 3:126155494:C:T, 3:126155498:C:G, 3:126155500:G:A, 3:126157341:A:G, 3:126157347:C:T, 3:126157348:C:T, 3:126157351:T:C, 3:126157356:C:T, 3:126157371:A:C, 3:126157374:C:T, 3:126157374:C:A, 3:126157393:C:T, 3:126157399:C:T, 3:126157411:C:T, 3:126157426:G:A, 3:126157428:A:G, 3:126157450:G:C, 3:126157452:C:T, 3:126157456:C:T, 3:126157461:G:T, 3:126157461:G:A, 3:126157462:C:T, 3:126157465:A:G, 3:126157468:A:G, 3:126157473:G:A, 3:126157477:A:C, 3:126157477:A:T, 3:126157482:C:A, 3:126157482:C:T, 3:126158403:A:G, 3:126158404:C:T, 3:126158406:A:T, 3:126158411:A:T, 3:126158421:C:A, 3:126158433:T:C, 3:126158442:G:C, 3:126158457:T:C, 3:126158458:G:C, 3:126158469:G:A, 3:126158471:C:CG, 3:126158475:G:C, 3:126158493:T:C, 3:126158499:T:C, 3:126158502:A:T, 3:126158516:G:T, 3:126158523:C:CGTTG, 3:126158529:G:T, 3:126158534:G:A, 3:126158560:CA:C, 3:126158567:G:A, 3:126158573:G:T, 3:126158580:C:G, 3:126158590:C:T, 3:126158592:A:T, 3:126158594:C:T, 3:126158617:TC:T, 3:126158618:C:T, 3:126158619:C:T, 3:126160852:C:T, 3:126160853:C:G, 3:126160855:AG:A, 3:126160865:C:A, 3:126160866:C:CT, 3:126160874:C:A, 3:126160882:G:A, 3:126160892:A:G, 3:126160897:C:T, 3:126160937:C:T, 3:126160956:C:A, 3:126160962:A:C, 3:126160972:A:G, 3:126161003:C:G, 3:126161004:T:A, 3:126180474:A:G, and 3:126180967:A:G (according to the GRCh38/hg38 human genome assembly).

[0245] In some embodiments, the subject's aggregate gene burden of having any one or more ALDH1L1 variant nucleic acid molecules encoding ALDH1L1 predicted loss-of-function polypeptides represents a weighted sum of a plurality of any of the ALDH1L1 variant nucleic acid molecules encoding ALDH1L1 predicted loss-of-function polypeptides. In some embodiments, the aggregate gene burden is calculated using at least about 2, at least about 3, at least about 4, at least about 5, at least about 10, at least about 20, at least about 30, at least about 40, at least about 50, at least about 60, at least about 70, at least about 80, at least about 100, at least about 120, at least about 150, at least about 200, at least about 250, at least about 300, at least about 400, at least about 500, at least about 1,000, at least about 10,000, at least about 100,000, or at least about or more than 1,000,000 genetic variants present in or around (up to 10 Mb) the ALDH1L1 gene where the gene burden is the number of alleles multiplied by the association estimate with kidney disease or related outcome for each allele (e.g., a weighted burden score). This can include any genetic variants, regardless of their genomic annotation, in proximity to the ALDH1L1 gene (up to 10 Mb around the gene) that show a non-zero association with kidney disease-related traits in a genetic association analysis. In some embodiments, when the subject has an aggregate gene burden above a desired threshold score, the subject has a decreased risk of developing a kidney disease. In some embodiments, when the subject has an aggregate gene burden below a desired threshold score, the subject has an increased risk of developing a kidney disease.

[0246] In some embodiments, any of the methods described herein can further comprise determining the subject's aggregate gene burden of having ALDOB variant nucleic acid molecules encoding ALDOB predicted loss-of-function polypeptides associated with a decreased risk of developing a kidney disease. The aggregate gene burden is the sum of all variants in the ALDOB gene, which can be carried out in an association analysis with a kidney disease. In some embodiments, the subject is homozygous for one or more ALDOB variant nucleic acid molecules encoding ALDOB predicted loss-of-function polypeptides associated with a decreased risk of developing a kidney disease. In some embodiments, the subject is heterozygous for one or more ALDOB variant nucleic acid molecules encoding ALDOB predicted loss-of-function polypeptides associated with a decreased risk of developing a kidney disease. The result of the association analysis suggests that ALDOB variant nucleic acid molecules encoding ALDOB predicted loss-of-function polypeptides are associated with decreased risk of developing a kidney disease. When the subject has a lower aggregate gene burden, the subject is at a higher risk of developing a kidney disease and the subject is administered or continued to be administered a therapeutic agent that treats, prevents, or inhibits a kidney disease in an amount that is the same as or less than a standard dosage amount, and/or an ALDOB inhibitor. When the subject has a greater aggregate gene burden, the subject is at a lower risk of developing a kidney disease and the subject is administered or continued to be administered a therapeutic agent that treats, prevents, or inhibits a kidney disease in a standard dosage amount. The greater the aggregate gene burden, the lower the risk of developing a kidney disease.

[0247] ALDOB predicted loss of function variants include, but are not limited to: 9:101421809:C:G, 9:101421837:G:T, 9:101424886:G:A, 9:101424936:A:G, 9:101424947:TTA:T, 9:101425044:T:G, 9:101426567:A:C, 9:101426567:A:T, 9:101426572:G:A, 9:101427500:G:C, 9:101428468:C:A, 9:101428484:CTTTG:C, 9:101429753:A:T, 9:101429776:CT:C, 9:101429828:AG:A, 9:101429901:G:A, 9:101430878:G:A, 9:101430886:A:G, 9:101430887:T:C, 9:101424878:C:A, 9:101425629:T:C, 9:101426589:TG:T, 9:101426611:CT:C, 9:101429963:GTACC:G, 9:101421841:G:A, 9:101421863:AC:A, 9:101421875:A:C, 9:101421905:C:T, 9:101421905:C:A, 9:101424846:GGCCC:G, 9:101424855:C:A, 9:101424894:GC:G, 9:101424923:G:A, 9:101424976:AG:A, 9:101425007:CCTCTTCA:C, 9:101425028:AC:A, 9:101425452:C:G, 9:101425558:TG:T, 9:101425610:G:T, 9:101425628:C:A, 9:101426554:C:T, 9:101426623:TA:T, 9:101427481:C:T, 9:101427481:C:G, 9:101427607:TG:T, 9:101427624:TC:T, 9:101427644:T:G, 9:101428487:TG:T, 9:101428488:GT:G, 9:101428517:G:A, 9:101428520:CT:C, 9:101429754:C:T, 9:101429839:GA:G, 9:101429880:CCA:C, 9:101429884:AG:A, 9:101429937:T:A, 9:101429967:C:T, 9:101429968:T:A, and 9:101430836:C:A (according to the GRCh38/hg38 human genome assembly).

[0248] ALDO pLOF or missense variants predicted to be deleterious by at least 1 out of 5 in silico prediction algorithms with AAF<1% include, but are not limited to: 9:101421809:C:G, 9:101421816:G:A, 9:101421837:G:T, 9:101421837:G:A, 9:101421855:C:G, 9:101421867:G:A, 9:101421871:G:A, 9:101421876:T:C, 9:101421877:A:G, 9:101421891:G:A, 9:101421899:G:C, 9:101424850:C:T, 9:101424851:G:A, 9:101424862:G:A, 9:101424876:C:T, 9:101424886:G:A, 9:101424887:C:T, 9:101424895:C:T, 9:101424915:A:C, 9:101424931:C:T, 9:101424932:G:A, 9:101424936:A:G, 9:101424947:TTA:T, 9:101424959:G:A, 9:101424964:G:C, 9:101424973:C:A, 9:101424976:A:G, 9:101424977:G:T, 9:101424983:T:C, 9:101424985:G:A, 9:101424994:T:C, 9:101425003:G:A, 9:101425024:C:T, 9:101425042:C:T, 9:101425044:T:G, 9:101425477:G:C, 9:101425477:G:A, 9:101425480:G:A, 9:101425492:C:T, 9:101425501:T:C, 9:101425504:C:A, 9:101425537:C:A, 9:101425554:A:T, 9:101425577:C:A, 9:101425589:A:T, 9:101425591:G:T, 9:101425614:A:T, 9:101425614:A:G, 9:101426560:C:G, 9:101426567:A:C, 9:101426567:A:T, 9:101426572:G:A, 9:101426589:T:C, 9:101426598:T:C, 9:101426602:G:T, 9:101426608:C:T, 9:101426619:A:G, 9:101426622:A:G, 9:101426623:T:C, 9:101426636:A:C, 9:101427493:T:G, 9:101427493:T:C, 9:101427498:G:T, 9:101427499:C:T, 9:101427500:G:C, 9:101427505:G:A, 9:101427520:C:T, 9:101427534:G:A, 9:101427535:C:T, 9:101427556:C:T, 9:101427574:C:G, 9:101427576:C:T, 9:101427577:G:A, 9:101427580:A:G, 9:101427621:C:T, 9:101427622:G:T, 9:101427622:G:A, 9:101428468:C:A, 9:101428483:T:C, 9:101428484:CTTTG:C, 9:101428496:C:T, 9:101428502:G:A, 9:101428504:G:A, 9:101428510:C:T, 9:101429753:A:T, 9:101429765:A:C, 9:101429769:C:T, 9:101429776:CT:C, 9:101429797:G:C, 9:101429803:C:A, 9:101429813:C:T, 9:101429816:T:C, 9:101429828:AG:A, 9:101429829:G:A, 9:101429835:C:T, 9:101429900:C:T, 9:101429901:G:A, 9:101429909:C:T, 9:101429910:G:A, 9:101429912:C:A, 9:101429913:G:T, 9:101429913:G:A, 9:101429943:T:A, 9:101429951:C:T, 9:101429952:G:A, 9:101429960:A:G, 9:101430878:G:A, 9:101430886:A:G, 9:101430887:T:C, 9:101421813:T:C, 9:101421819:T:C, 9:101421838:A:G, 9:101421840:T:C, 9:101421847:A:G, 9:101421874:C:T, 9:101424860:A:T, 9:101424878:C:A, 9:101424879:C:A, 9:101424888:A:G, 9:101424890:C:A, 9:101424916:C:A, 9:101424920:C:A, 9:101424967:A:G, 9:101424972:G:C, 9:101424974:A:G, 9:101424977:G:A, 9:101424989:T:G, 9:101425015:C:T, 9:101425016:T:G, 9:101425017:C:G, 9:101425470:A:G, 9:101425471:C:G, 9:101425476:C:T, 9:101425482:A:G, 9:101425486:C:A, 9:101425492:C:A, 9:101425537:C:G, 9:101425588:C:A, 9:101425629:T:C, 9:101426555:C:G, 9:101426571:T:G, 9:101426589:TG:T, 9:101426596:C:T, 9:101426599:C:G, 9:101426611:C:T, 9:101426611:CT:C, 9:101427483:T:A, 9:101427504:C:T, 9:101427526:C:G, 9:101427544:A:G, 9:101427546:G:A, 9:101427550:A:G, 9:101427556:C:G, 9:101427586:C:T, 9:101427617:A:C, 9:101427618:C:T, 9:101428507:G:A, 9:101428514:C:T, 9:101429775:C:T, 9:101429787:G:A, 9:101429815:G:T, 9:101429831:G:A, 9:101429859:T:A, 9:101429876:C:A, 9:101429909:C:A, 9:101429912:C:T, 9:101429944:C:A, 9:101429951:C:A, 9:101429952:G:T, 9:101429963:GTACC:G, 9:101430779:C:T, 9:101430799:A:T, 9:101430805:T:G, 9:101430811:T:C, 9:101430815:C:T, 9:101430829:G:A, 9:101430877:C:G, 9:101421817:T:C, 9:101421820:A:G, 9:101421823:A:G, 9:101421841:G:A, 9:101421841:G:T, 9:101421849:G:A, 9:101421850:C:A, 9:101421855:C:A, 9:101421863:AC:A, 9:101421865:C:T, 9:101421870:T:G, 9:101421875:A:C, 9:101421878:C:G, 9:101421879:T:C, 9:101421880:G:C, 9:101421891:G:T, 9:101421892:C:T, 9:101421898:A:G, 9:101421901:T:A, 9:101421901:T:C, 9:101421903:G:A, 9:101421905:C:A, 9:101421905:C:T, 9:101424844:A:G, 9:101424845:T:G, 9:101424846:GGCCC:G, 9:101424848:C:T, 9:101424850:C:A, 9:101424855:C:A, 9:101424857:T:C, 9:101424874:G:T, 9:101424879:C:G, 9:101424879:C:T, 9:101424881:T:C, 9:101424889:G:T, 9:101424892:T:G, 9:101424893:T:C, 9:101424894:GC:G, 9:101424905:C:A, 9:101424913:G:A, 9:101424917:T:G, 9:101424919:G:C, 9:101424922:T:C, 9:101424922:T:G, 9:101424923:G:A, 9:101424923:G:T, 9:101424929:C:T, 9:101424934:C:A, 9:101424941:A:G, 9:101424946:C:G, 9:101424956:A:G, 9:101424958:G:A, 9:101424968:G:T, 9:101424976:AG:A, 9:101424978:G:C, 9:101424982:A:T, 9:101424991:A:G, 9:101424992:G:A, 9:101424995:T:C, 9:101425000:G:A, 9:101425003:G:C, 9:101425007:CCTCTTCA:C, 9:101425008:C:G, 9:101425013:C:T, 9:101425015:C:G, 9:101425016:T:C, 9:101425017:C:T, 9:101425018:A:C, 9:101425019:T:C, 9:101425021:C:T, 9:101425027:G:A, 9:101425028:AC:A, 9:101425029:C:G, 9:101425030:A:G, 9:101425036:C:G, 9:101425452:C:G, 9:101425458:A:T, 9:101425465:C:T, 9:101425471:C:T, 9:101425480:G:C, 9:101425480:G:T, 9:101425494:G:A, 9:101425495:T:G, 9:101425501:T:G, 9:101425513:C:T, 9:101425518:G:A, 9:101425522:A:G, 9:101425523:C:A, 9:101425525:T:G, 9:101425526:C:G, 9:101425530:G:A, 9:101425538:A:T, 9:101425539:T:G, 9:101425542:C:G, 9:101425542:C:T, 9:101425546:C:T, 9:101425546:C:A, 9:101425557:T:C, 9:101425557:T:G, 9:101425558:TG:T, 9:101425564:T:C, 9:101425570:G:T, 9:101425570:G:C, 9:101425576:C:T, 9:101425578:T:C, 9:101425581:A:G, 9:101425590:T:C, 9:101425592:A:T, 9:101425595:G:T, 9:101425607:C:G, 9:101425608:T:C, 9:101425609:T:G, 9:101425610:G:T, 9:101425612:A:C, 9:101425628:C:A, 9:101426554:C:T, 9:101426562:G:A, 9:101426565:A:G, 9:101426566:C:T, 9:101426568:T:C, 9:101426570:C:A, 9:101426574:C:T, 9:101426581:C:G, 9:101426583:A:G, 9:101426587:C:G, 9:101426593:C:T, 9:101426623:TA:T, 9:101426626:G:C, 9:101426628:A:G, 9:101426632:G:T, 9:101426632:G:C, 9:101426634:C:T, 9:101426637:T:C, 9:101427481:C:T, 9:101427481:C:G, 9:101427484:G:T, 9:101427489:C:T, 9:101427496:T:C, 9:101427499:C:G, 9:101427504:C:G, 9:101427514:C:A, 9:101427516:T:C, 9:101427519:G:A, 9:101427521:G:T, 9:101427525:T:A, 9:101427532:T:C, 9:101427537:A:G, 9:101427538:G:A, 9:101427544:A:T, 9:101427547:G:C, 9:101427547:G:T, 9:101427549:C:T, 9:101427550:A:T, 9:101427554:G:T, 9:101427565:T:C, 9:101427571:C:G, 9:101427571:C:T, 9:101427574:C:T, 9:101427576:C:A, 9:101427580:A:C, 9:101427589:A:G, 9:101427601:C:T, 9:101427607:TG:T, 9:101427612:T:C, 9:101427615:G:C, 9:101427615:G:A, 9:101427621:C:A, 9:101427624:TC:T, 9:101427634:C:T, 9:101427642:C:T, 9:101427644:T:G, 9:101428474:A:T, 9:101428475:T:C, 9:101428484:C:T, 9:101428487:TG:T, 9:101428488:GT:G, 9:101428488:G:T, 9:101428498:G:A, 9:101428499:C:T, 9:101428508:C:G, 9:101428511:C:G, 9:101428513:C:T, 9:101428517:G:A, 9:101428519:T:A, 9:101428520:CT:C, 9:101429754:C:T, 9:101429755:C:G, 9:101429763:C:G, 9:101429765:A:G, 9:101429766:C:T, 9:101429771:A:T, 9:101429772:T:A, 9:101429776:C:A, 9:101429780:T:C, 9:101429782:C:A, 9:101429784:T:C, 9:101429787:G:C, 9:101429789:A:T, 9:101429804:T:A, 9:101429807:C:A, 9:101429809:C:G, 9:101429814:T:C, 9:101429834:T:A, 9:101429839:GA:G, 9:101429846:A:T, 9:101429849:A:G, 9:101429850:C:T, 9:101429852:C:A, 9:101429853:C:T, 9:101429855:C:T, 9:101429856:C:T, 9:101429856:C:G, 9:101429858:A:G, 9:101429858:A:C, 9:101429859:T:C, 9:101429861:C:G, 9:101429866:G:T, 9:101429867:T:C, 9:101429871:T:G, 9:101429871:T:A, 9:101429880:CCA:C, 9:101429883:C:A, 9:101429883:C:T, 9:101429884:AG:A, 9:101429888:A:G, 9:101429898:C:G, 9:101429917:C:G, 9:101429925:T:C, 9:101429936:T:A, 9:101429937:T:A, 9:101429939:A:C, 9:101429946:G:T, 9:101429948:A:G, 9:101429948:A:C, 9:101429949:G:C, 9:101429953:G:T, 9:101429958:C:A, 9:101429958:C:G, 9:101429959:C:G, 9:101429961:T:C, 9:101429967:C:T, 9:101429968:T:A, 9:101430776:C:G, 9:101430776:C:A, 9:101430782:A:G, 9:101430794:C:G, 9:101430796:A:G, 9:101430802:C:A, 9:101430803:C:G, 9:101430808:C:T, 9:101430811:T:A, 9:101430812:T:C, 9:101430814:G:A, 9:101430823:C:T, 9:101430830:C:A, 9:101430831:A:C, 9:101430836:C:T, 9:101430836:C:A, 9:101430845:C:T, 9:101430847:T:C, 9:101430848:T:C, 9:101430854:G:T, 9:101430855:C:A, 9:101430857:C:G, 9:101430862:G:T, 9:101430872:G:A, and 9:101430883:G:A (according to the GRCh38/hg38 human genome assembly).

[0249] In some embodiments, the subject's aggregate gene burden of having any one or more ALDOB variant nucleic acid molecules encoding ALDOB predicted loss-of-function polypeptides represents a weighted sum of a plurality of any of the ALDOB variant nucleic acid molecules encoding ALDOB predicted loss-of-function polypeptides. In some embodiments, the aggregate gene burden is calculated using at least about 2, at least about 3, at least about 4, at least about 5, at least about 10, at least about 20, at least about 30, at least about 40, at least about 50, at least about 60, at least about 70, at least about 80, at least about 100, at least about 120, at least about 150, at least about 200, at least about 250, at least about 300, at least about 400, at least about 500, at least about 1,000, at least about 10,000, at least about 100,000, or at least about or more than 1,000,000 genetic variants present in or around (up to 10 Mb) the ALDOB gene where the gene burden is the number of alleles multiplied by the association estimate with kidney disease or related outcome for each allele (e.g., a weighted burden score). This can include any genetic variants, regardless of their genomic annotation, in proximity to the ALDOB gene (up to 10 Mb around the gene) that show a non-zero association with kidney disease-related traits in a genetic association analysis. In some embodiments, when the subject has an aggregate gene burden above a desired threshold score, the subject has a decreased risk of developing a kidney disease. In some embodiments, when the subject has an aggregate gene burden below a desired threshold score, the subject has an increased risk of developing a kidney disease.

[0250] In some embodiments, any of the methods described herein can further comprise determining the subject's aggregate gene burden of having G6PC variant nucleic acid molecules encoding G6PC predicted loss-of-function polypeptides associated with a decreased risk of developing a kidney disease. The aggregate gene burden is the sum of all variants in the G6PC gene, which can be carried out in an association analysis with a kidney disease. In some embodiments, the subject is homozygous for one or more G6PC variant nucleic acid molecules encoding G6PC predicted loss-of-function polypeptides associated with a decreased risk of developing a kidney disease. In some embodiments, the subject is heterozygous for one or more G6PC variant nucleic acid molecules encoding G6PC predicted loss-of-function polypeptides associated with a decreased risk of developing a kidney disease. The result of the association analysis suggests that G6PC variant nucleic acid molecules encoding G6PC predicted loss-of-function polypeptides are associated with decreased risk of developing a kidney disease. When the subject has a lower aggregate gene burden, the subject is at a higher risk of developing a kidney disease and the subject is administered or continued to be administered a therapeutic agent that treats, prevents, or inhibits a kidney disease in an amount that is the same as or less than a standard dosage amount, and/or a G6PC inhibitor. When the subject has a greater aggregate gene burden, the subject is at a lower risk of developing a kidney disease and the subject is administered or continued to be administered a therapeutic agent that treats, prevents, or inhibits a kidney disease in a standard dosage amount. The greater the aggregate gene burden, the lower the risk of developing a kidney disease.

[0251] G6PC predicted loss of function variants include, but are not limited to: 17:42900952:TC:T, 17:42901065:G:A, 17:42901085:G:A, 17:42909364:C:T, 17:42910958:T:C, 17:42911076:C:T, 17:42911084:G:A, 17:42911221:AG:A, 7:42911321:C:A, 17:42911391:C:T, 17:42900878:T:A, 17:42903956:TG:T, 17:42907558:G:GTA, 17:42909302:G:A, 17:42909412:CTG:C, 17:42910914:G:T, 17:42911087:C:A, 17:42900920:C:G, 17:42901010:TC:T, 17:42901025:GGT:G, 17:42901063:TG:T, 17:42901107:G:C, 17:42903929:AGGATT:A, 17:42903930:G:A, 17:42903948:G:GTCCA, 17:42903955:C:A, 17:42903958:G:A, 17:42903959:TG:T, 17:42903962:GT:G, 17:42903992:TC:T, 17:42904024:CTG:C, 17:42907530:CT:C, 17:42907563:C:G, 17:42907620:C:T, 17:42907629:G:C, 17:42909350:ATGTC:A, 17:42909354:C:CT, 17:42909403:GC:G, 17:42909416:C:G, 17:42911138:CA:C, 17:42911149:GC:G, 17:42911213:ACT:A, 17:42911336:C:A, 17:42911355:CT:C, and 17:42911403:C:T (according to the GRCh38/hg38 human genome assembly).

[0252] G6PC pLOF or missense variants predicted to be deleterious by at least 1 out of 5 or 5 out of 5, respectively, in silico prediction algorithms with AAF<1% include, but are not limited to: 17:42900935:A:G, 17:42900952:TC:T, 17:42900989:A:T, 17:42900994:A:G, 17:42900999:T:G, 17:42901065:G:A, 17:42901067:T:G, 17:42901069:G:T, 17:42901085:G:A, 17:42901105:T:C, 17:42903939:T:C, 17:42903947:C:T, 17:42903948:G:A, 17:42903968:G:T, 17:42904028:G:A, 17:42904034:G:A, 17:42907552:G:A, 17:42909356:G:A, 17:42909364:C:T, 17:42909365:G:A, 17:42910924:T:C, 17:42910958:T:C, 17:42911017:G:C, 17:42911076:C:T, 17:42911084:G:A, 17:42911085:T:C, 17:42911098:A:T, 17:42911121:C:A, 17:42911124:T:C, 17:42911144:C:A, 17:42911221:AG:A, 17:42911235:C:T, 17:42911236:G:A, 17:42911295:C:G, 17:42911296:C:T, 17:42911321:C:A, 17:42911329:C:G, 17:42911391:C:T, 17:42900878:T:A, 17:42900890:T:G, 17:42900891:G:A, 17:42900910:G:C, 17:42900985:G:A, 17:42901093:C:A, 17:42903956:TG:T, 17:42903959:T:A, 17:42904035:G:A, 17:42907534:G:A, 17:42907537:C:T, 17:42907558:G:GTA, 17:42909302:G:A, 17:42909412:CTG:C, 17:42910914:G:T, 17:42911087:C:A, 17:42911116:C:T, 17:42911127:G:T, 17:42911161:G:T, 17:42911292:C:T, 17:42911318:C:A, 17:42900902:A:G, 17:42900920:C:G, 17:42900931:C:T, 17:42900935:A:C, 17:42900977:C:G, 17:42900988:G:T, 17:42901010:TC:T, 17:42901013:T:C, 17:42901016:T:C, 17:42901016:T:G, 17:42901018:C:G, 17:42901025:GGT:G, 17:42901026:G:T, 17:42901034:T:C, 17:42901048:G:T, 17:42901057:C:T, 17:42901063:TG:T, 17:42901066:G:A, 17:42901067:T:C, 17:42901070:C:T, 17:42901075:A:T, 17:42901084:T:G, 17:42901097:T:C, 17:42901107:G:C, 17:42903929:AGGATT:A, 17:42903930:G:A, 17:42903935:C:A, 17:42903939:T:A, 17:42903947:C:G, 17:42903948:G:GTCCA, 17:42903950:C:T, 17:42903955:C:A, 17:42903957:G:T, 17:42903958:G:A, 17:42903959:TG:T, 17:42903962:GT:G, 17:42903968:G:A, 17:42903969:A:G, 17:42903992:TC:T, 17:42903998:C:T, 17:42904004:A:G, 17:42904005:T:C, 17:42904024:CTG:C, 17:42904026:G:A, 17:42904032:C:T, 17:42904035:G:C, 17:42904037:C:A, 17:42907523:G:A, 17:42907530:CT:C, 17:42907538:A:G, 17:42907543:A:G, 17:42907545:G:A, 17:42907547:G:A, 17:42907563:C:G, 17:42907564:T:C, 17:42907567:G:A, 17:42907577:C:T, 17:42907620:C:T, 17:42907629:G:C, 17:42909322:T:G, 17:42909350:ATGTC:A, 17:42909354:C:CT, 17:42909403:GC:G, 17:42909416:C:G, 17:42910927:C:T, 17:42910957:A:C, 17:42910977:T:C, 17:42911008:T:G, 17:42911016:G:A, 17:42911029:T:C, 17:42911074:C:T, 17:42911102:G:T, 17:42911119:C:G, 17:42911127:G:A, 17:42911128:C:T, 17:42911132:C:A, 17:42911138:CA:C, 17:42911149:GC:G, 17:42911160:G:A, 17:42911182:C:T, 17:42911190:T:A, 17:42911213:ACT:A, 17:42911316:T:G, 17:42911329:C:T, 17:42911336:C:A, 17:42911336:C:G, 17:42911343:G:A, 17:42911344:C:G, 17:42911355:CT:C, 17:42911403:C:T, and 17:42911417:G:T (according to the GRCh38/hg38 human genome assembly).

[0253] In some embodiments, the subject's aggregate gene burden of having any one or more G6PC variant nucleic acid molecules encoding G6PC predicted loss-of-function polypeptides represents a weighted sum of a plurality of any of the G6PC variant nucleic acid molecules encoding G6PC predicted loss-of-function polypeptides. In some embodiments, the aggregate gene burden is calculated using at least about 2, at least about 3, at least about 4, at least about 5, at least about 10, at least about 20, at least about 30, at least about 40, at least about 50, at least about 60, at least about 70, at least about 80, at least about 100, at least about 120, at least about 150, at least about 200, at least about 250, at least about 300, at least about 400, at least about 500, at least about 1,000, at least about 10,000, at least about 100,000, or at least about or more than 1,000,000 genetic variants present in or around (up to 10 Mb) the G6PC gene where the gene burden is the number of alleles multiplied by the association estimate with kidney disease or related outcome for each allele (e.g., a weighted burden score). This can include any genetic variants, regardless of their genomic annotation, in proximity to the G6PC gene (up to 10 Mb around the gene) that show a non-zero association with kidney disease-related traits in a genetic association analysis. In some embodiments, when the subject has an aggregate gene burden above a desired threshold score, the subject has a decreased risk of developing a kidney disease. In some embodiments, when the subject has an aggregate gene burden below a desired threshold score, the subject has an increased risk of developing a kidney disease.

[0254] In some embodiments, any of the methods described herein can further comprise determining the subject's aggregate gene burden of having LRP2 variant nucleic acid molecules encoding LRP2 predicted loss-of-function polypeptides associated with a decreased risk of developing a kidney disease. The aggregate gene burden is the sum of all variants in the LRP2 gene, which can be carried out in an association analysis with a kidney disease. In some embodiments, the subject is homozygous for one or more LRP2 variant nucleic acid molecules encoding LRP2 predicted loss-of-function polypeptides associated with a decreased risk of developing a kidney disease. In some embodiments, the subject is heterozygous for one or more LRP2 variant nucleic acid molecules encoding LRP2 predicted loss-of-function polypeptides associated with a decreased risk of developing a kidney disease. The result of the association analysis suggests that LRP2 variant nucleic acid molecules encoding LRP2 predicted loss-of-function polypeptides are associated with decreased risk of developing a kidney disease. When the subject has a lower aggregate gene burden, the subject is at a higher risk of developing a kidney disease and the subject is administered or continued to be administered a therapeutic agent that treats, prevents, or inhibits a kidney disease in an amount that is the same as or less than a standard dosage amount, and/or an LRP2 inhibitor. When the subject has a greater aggregate gene burden, the subject is at a lower risk of developing a kidney disease and the subject is administered or continued to be administered a therapeutic agent that treats, prevents, or inhibits a kidney disease in a standard dosage amount. The greater the aggregate gene burden, the lower the risk of developing a kidney disease.

[0255] LRP2 predicted loss-of-function variants include, but are not limited to: 2:169128827:C:A, 2:169137390:A:G, 2:169137391:C:A, 2:169140514:T:TG, 2:169145826:TC:T, 2:169156407:T:C, 2:169170608:G:A, 2:169174130:G:T, 2:169175301:G:A, 2:169181609:G:T, 2:169186020:C:A, 2:169188266:C:T, 2:169193760:C:T, 2:169201627:C:T, 2:169206561:C:A, 2:169206842:AC:A, 2:169206993:G:A, 2:169209643:T:C, 2:169213822:G:A, 2:169220565:T:C, 2:169238089:A:G, 2:169240944:T:C, 2:169240951:G:T, 2:169241019:G:T, 2:169242989:C:CA, 2:169256152:GC:G, 2:169257126:C:T, 2:169257205:CT:C, 2:169275035:C:T, 2:169279371:C:T, 2:169292325:G:A, 2:169294711:C:A, 2:169128741:G:GTCTC, 2:169129060:G:A, 2:169132661:CA:C, 2:169132664:AT:A, 2:169137405:AC:A, 2:169139250:C:T, 2:169140514:TG:T, 2:169145840:T:A, 2:169145924:C:T, 2:169152840:G:T, 2:169154604:C:G, 2:169156289:G:A, 2:169157370:C:T, 2:169162559:T:A, 2:169162560:A:C, 2:169172041:CCA:C, 2:169173916:T:TA, 2:169173917:A:T, 2:169174099:G:A, 2:169186011:C:A, 2:169188011:TG:T, 2:169198791:TA:T, 2:169198834:C:A, 2:169201806:G:T, 2:169204175:A:T, 2:169206368:AG:A, 2:169209639:G:A, 2:169216431:C:G, 2:169233510:G:A, 2:169236053:GA:G, 2:169242955:C:T, 2:169257123:C:T, 2:169270925:T:TA, 2:169275228:CTACAGTCT:C, 2:169275239:CTGT:C, 2:169292251:AC:A, 2:169294598:A:T, 2:169294708:ACT:A, 2:169307280:C:T, 2:169307386:AT:A, 2:169307398:C:T, 2:169307399:T:C, 2:169362374:GC:G, 2:169128751:G:T, 2:169128778:G:T, 2:169129011:A:T, 2:169129012:C:T, 2:169129033:C:A, 2:169129085:C:T, 2:169132655:AT:A, 2:169137403:G:A, 2:169138576:C:T, 2:169139249:A:T, 2:169139538:CTTACTTG:C, 2:169140513:A:AT, 2:169142729:A:T, 2:169142735:G:T, 2:169142757:CAG:C, 2:169142784:AG:A, 2:169145780:G:A, 2:169145851:C:T, 2:169146737:A:C, 2:169146823:G:A, 2:169152798:C:A, 2:169152944:G:A, 2:169154511:C:CAA, 2:169154513:TC:T, 2:169154533:GA:G, 2:169154562:G:A, 2:169154568:G:A, 2:169156295:C:A, 2:169157426:GATAA:G, 2:169157434:C:CGTGG, 2:169157491:C:A, 2:169162592:GT:G, 2:169166003:CA:C, 2:169168633:GA:G, 2:169169701:C:T, 2:169169701:C:G, 2:169169726:CCAAA:C, 2:169169760:AC:A, 2:169172011:TCA:T, 2:169172121:G:T, 2:169173152:C:T, 2:169173978:C:T, 2:169174076:AC:A, 2:169174162:TC:T, 2:169175192:C:A, 2:169177802:C:A, 2:169177811:TG:T, 2:169177866:GTGTC:G, 2:169177890:ATT:A, 2:169177922:C:T, 2:169177934:T:TA, 2:169177986:C:CG, 2:169178001:G:A, 2:169181492:GGT:G, 2:169181615:G:T, 2:169185618:TC:T, 2:169185808:TG:T, 2:169185888:C:CAATA, 2:169187969:C:T, 2:169188033:C:A, 2:169193822:C:T, 2:169193881:G:A, 2:169198804:C:A, 2:169198912:C:A, 2:169201761:T:TG, 2:169201774:C:CATTGTAGT, 2:169201779:AC:A, 2:169201794:G:C, 2:169201826:G:A, 2:169202755:C:T, 2:169202870:G:A, 2:169202889:G:T, 2:169204116:G:C, 2:169204123:CAT:C, 2:169204138:G:A, 2:169204207:G:GGA, 2:169205534:TG:T, 2:169205638:C:T, 2:169206022:C:T, 2:169206065:C:CG, 2:169206596:AG:A, 2:169206844:C:T, 2:169207047:G:A, 2:169209451:A:G, 2:169209532:ATCTG:A, 2:169211966:A:G, 2:169211968:C:A, 2:169212132:C:CCAAAAGCATT, 2:169213735:T:A, 2:169213840:G:A, 2:169216252:C:G, 2:169216360:CA:C, 2:169216411:G:A, 2:169226434:C:T, 2:169226437:AT:A, 2:169226563:TAC:T, 2:169235839:C:A, 2:169235986:T:TG, 2:169236019:G:A, 2:169236026:G:GC, 2:169236042:C:T, 2:169237144:G:GT, 2:169237210:A:C, 2:169237222:G:T, 2:169237276:ACTGTCAAATAC:A, 2:169239525:A:G, 2:169239564:G:C, 2:169239681:TA:T, 2:169239682:A:C, 2:169240946:A:G, 2:169241126:T:A, 2:169241145:G:T, 2:169241224:GT:G, 2:169241239:G:GCATTGTGC, 2:169242954:A:T, 2:169243460:AT:A, 2:169243473:TC:T, 2:169243475:G:A, 2:169244692:C:T, 2:169244920:GA:G, 2:169246848:TC:T, 2:169246864:AG:A, 2:169246889:A:C, 2:169246909:G:A, 2:169246912:G:A, 2:169247474:G:A, 2:169247501:T:TA, 2:169256206:A:T, 2:169256229:G:A, 2:169257251:T:A, 2:169259024:C:A, 2:169259049:G:T, 2:169259064:A:C, 2:169259188:C:A, 2:169270902:A:T, 2:169270902:A:C, 2:169270902:A:G, 2:169270973:G:A, 2:169272970:G:T, 2:169273005:TTC:T, 2:169275045:G:A, 2:169275154:C:T, 2:169277843:C:T, 2:169279514:C:CCA, 2:169279583:CA:C, 2:169279588:G:T, 2:169282951:G:A, 2:169282996:CA:C, 2:169289025:C:A, 2:169289146:C:A, 2:169290870:G:GT, 2:169290935:G:A, 2:169292314:A:T, 2:169292320:G:T, 2:169294147:C:A, 2:169294159:TC:T, 2:169294255:ATC:A, 2:169294597:T:TAA, 2:169294601:G:T, 2:169294706:G:T, 2:169294712:T:A, 2:169307279:A:C, 2:169307279:AC:A, 2:169307382:G:C, 2:169307397:G:T, 2:169318760:A:AC, 2:169318761:C:T, 2:169318761:C:G, and 2:169320778:G:T (according to the GRCh38/hg38 human genome assembly).

[0256] LRP2 pLOF or missense variants with AAF<0.1%+pLOF or missense variants predicted to be deleterious by at least 1 out of 5 in silico prediction algorithms with AAF<1%: 2:169128668:C:G, 2:169128689:G:A, 2:169128690:A:T, 2:169128695:C:T, 2:169128710:T:A, 2:169128736:G:A, 2:169128740:G:C, 2:169128751:G:C, 2:169128776:G:A, 2:169128778:G:A, 2:169128781:G:A, 2:169128787:G:A, 2:169128799:G:A, 2:169128811:T:A, 2:169128818:G:T, 2:169128824:T:C, 2:169128827:C:A, 2:169129014:T:C, 2:169129020:T:A, 2:169129056:T:C, 2:169129062:T:G, 2:169132594:G:A, 2:169132604:G:T, 2:169132622:C:A, 2:169132650:T:C, 2:169132652:C:A, 2:169132656:T:C, 2:169132659:T:A, 2:169137390:A:G, 2:169137391:C:A, 2:169137402:T:G, 2:169137411:T:G, 2:169137464:C:G, 2:169137470:C:T, 2:169137472:T:C, 2:169137477:A:G, 2:169138578:A:G, 2:169138585:T:C, 2:169138597:T:C, 2:169138617:C:A, 2:169138636:T:C, 2:169138645:C:G, 2:169138693:C:G, 2:169138693:C:T, 2:169138699:T:C, 2:169138701:C:T, 2:169139259:C:G, 2:169139296:T:A, 2:169139333:C:T, 2:169139336:C:T, 2:169139338:A:G, 2:169139345:G:A, 2:169139348:T:C, 2:169139366:C:T, 2:169139579:C:T, 2:169139600:C:T, 2:169139603:T:C, 2:169140475:C:G, 2:169140480:C:T, 2:169140489:A:C, 2:169140498:C:T, 2:169140502:C:T, 2:169140504:T:C, 2:169140510:T:A, 2:169140514:T:TG, 2:169140516:G:C, 2:169140519:G:C, 2:169140521:G:A, 2:169140524:A:G, 2:169140531:T:C, 2:169142691:G:A, 2:169142692:T:C, 2:169142697:C:T, 2:169142719:G:T, 2:169142776:G:C, 2:169145777:T:C, 2:169145812:G:A, 2:169145826:TC:T, 2:169145834:C:T, 2:169145877:C:G, 2:169145920:A:T, 2:169146798:T:C, 2:169146874:C:T, 2:169146896:C:G, 2:169146898:C:G, 2:169146953:C:T, 2:169150910:T:C, 2:169150980:T:C, 2:169150987:C:G, 2:169150995:G:T, 2:169150995:G:A, 2:169152839:C:T, 2:169152875:T:C, 2:169152881:G:A, 2:169152884:C:T, 2:169152910:C:T, 2:169152911:G:A, 2:169152917:T:C, 2:169152943:C:T, 2:169154468:A:G, 2:169154469:T:C, 2:169154473:C:G, 2:169154528:T:G, 2:169154561:C:T, 2:169154567:C:T, 2:169154570:A:G, 2:169154573:T:C, 2:169154594:G:A, 2:169156300:C:T, 2:169156306:C:T, 2:169156307:T:A, 2:169156407:T:C, 2:169157379:G:A, 2:169157400:G:T, 2:169157404:C:G, 2:169157405:G:T, 2:169157413:C:T, 2:169157487:C:T, 2:169162489:G:A, 2:169162493:A:G, 2:169162508:C:T, 2:169162527:G:T, 2:169162549:T:A, 2:169162549:T:C, 2:169165973:A:C, 2:169165976:C:A, 2:169166007:G:A, 2:169166021:C:T, 2:169166022:G:A, 2:169166027:C:T, 2:169166053:C:G, 2:169168551:G:A, 2:169168569:C:T, 2:169168602:A:G, 2:169168613:C:T, 2:169168620:G:C, 2:169168632:C:T, 2:169168643:G:A, 2:169168653:A:C, 2:169168670:C:T, 2:169168671:G:A, 2:169169722:G:A, 2:169169723:C:T, 2:169169734:T:C, 2:169169738:C:T, 2:169169756:G:T, 2:169169760:A:C, 2:169169778:A:T, 2:169169783:T:C, 2:169169816:T:A, 2:169170560:G:A, 2:169170585:G:C, 2:169170596:C:T, 2:169170603:C:A, 2:169170608:G:A, 2:169170610:G:A, 2:169170643:T:A, 2:169170644:C:T, 2:169170652:G:C, 2:169170652:G:T, 2:169170661:C:A, 2:169172067:C:A, 2:169172071:C:T, 2:169172075:G:A, 2:169172081:T:A, 2:169172081:T:C, 2:169172101:C:T, 2:169172102:G:A, 2:169172120:G:A, 2:169172128:C:G, 2:169172134:T:A, 2:169173113:C:T, 2:169173117:T:C, 2:169173156:T:G, 2:169173167:C:T, 2:169173168:G:A, 2:169173179:T:C, 2:169173224:A:G, 2:169173930:A:G, 2:169173948:T:G, 2:169173951:C:T, 2:169173982:C:T, 2:169173987:G:A, 2:169173991:T:C, 2:169174011:C:T, 2:169174012:G:A, 2:169174023:G:A, 2:169174026:C:T, 2:169174027:G:A, 2:169174039:T:C, 2:169174050:G:A, 2:169174081:C:T, 2:169174086:A:T, 2:169174119:C:T, 2:169174120:G:A, 2:169174128:G:A, 2:169174129:C:T, 2:169174130:G:T, 2:169174143:T:C, 2:169175204:C:T, 2:169175205:G:A, 2:169175250:A:T, 2:169175258:G:A, 2:169175264:G:A, 2:169175270:T:C, 2:169175280:T:C, 2:169175300:C:T, 2:169175301:G:A, 2:169175310:G:A, 2:169175315:G:A, 2:169175328:G:T, 2:169176423:G:A, 2:169176434:C:A, 2:169176434:C:G, 2:169176435:T:C, 2:169176436:G:T, 2:169176439:T:G, 2:169176451:T:G, 2:169176456:A:G, 2:169176477:A:C, 2:169176490:G:A, 2:169176496:C:T, 2:169176508:C:T, 2:169176520:C:G, 2:169176540:A:T, 2:169176579:G:A, 2:169176584:G:T, 2:169177866:G:T, 2:169177884:C:T, 2:169177889:T:A, 2:169177913:C:T, 2:169177914:T:C, 2:169177957:A:C, 2:169177959:T:C, 2:169177962:C:T, 2:169177970:T:C, 2:169177982:C:T, 2:169177985:T:A, 2:169177994:G:A, 2:169177994:G:C, 2:169181452:T:C, 2:169181460:A:G, 2:169181473:C:T, 2:169181487:T:G, 2:169181490:T:C, 2:169181581:T:C, 2:169181587:C:T, 2:169181589:C:T, 2:169181590:G:A, 2:169181592:T:A, 2:169181595:C:T, 2:169181597:C:G, 2:169181609:G:T, 2:169181614:G:A, 2:169182173:T:C, 2:169182218:T:C, 2:169182221:T:C, 2:169182251:C:T, 2:169182252:G:A, 2:169182254:C:T, 2:169182255:G:A, 2:169182264:C:T, 2:169182266:T:C, 2:169182270:G:A, 2:169182276:A:T, 2:169182296:C:T, 2:169182297:G:T, 2:169182299:G:T, 2:169182307:C:A, 2:169182315:G:A, 2:169182315:G:T, 2:169185504:T:C, 2:169185525:G:T, 2:169185536:G:A, 2:169185537:C:G, 2:169185539:G:A, 2:169185545:C:T, 2:169185549:G:A, 2:169185561:T:C, 2:169185572:G:T, 2:169185583:A:T, 2:169185590:C:G, 2:169185611:G:A, 2:169185617:A:G, 2:169185641:C:T, 2:169185666:T:C, 2:169185687:G:A, 2:169185707:A:G, 2:169185725:T:A, 2:169185731:C:T, 2:169185734:T:C, 2:169185756:C:T, 2:169185773:C:T, 2:169185774:G:A, 2:169185809:G:A, 2:169185812:G:A, 2:169185825:T:C, 2:169185856:G:T, 2:169185858:T:C, 2:169185870:G:T, 2:169185871:C:T, 2:169185890:A:G, 2:169185905:C:G, 2:169185906:G:A, 2:169185916:C:T, 2:169185922:C:A, 2:169185935:C:A, 2:169185935:C:T, 2:169185981:C:T, 2:169186012:A:C, 2:169186019:C:A, 2:169186020:C:A, 2:169187987:C:T, 2:169188005:T:A, 2:169188008:A:G, 2:169188014:T:C, 2:169188042:G:A, 2:169188062:T:C, 2:169188074:C:A, 2:169188086:G:C, 2:169188120:C:T, 2:169188134:T:C, 2:169188150:C:T, 2:169188165:T:C, 2:169188170:C:T, 2:169188171:G:A, 2:169188174:C:T, 2:169188185:G:A, 2:169188207:T:C, 2:169188221:C:G, 2:169188224:C:A, 2:169188234:T:C, 2:169188248:T:C, 2:169188258:G:A, 2:169188266:C:T, 2:169191836:A:G, 2:169191857:C:T, 2:169191874:T:C, 2:169191890:T:G, 2:169191903:A:C, 2:169191923:C:T, 2:169191982:G:A, 2:169192010:C:T, 2:169192016:C:A, 2:169192018:G:A, 2:169193760:C:T, 2:169193782:C:T, 2:169193787:C:A, 2:169193799:C:T, 2:169193806:T:C, 2:169193811:C:G, 2:169193812:C:T, 2:169193827:C:T, 2:169193847:C:A, 2:169193849:A:C, 2:169193889:T:C, 2:169193890:G:A, 2:169196923:G:T, 2:169196970:T:C, 2:169196980:T:C, 2:169196985:C:T, 2:169196986:G:A, 2:169197000:T:C, 2:169197006:T:G, 2:169197015:C:A, 2:169197018:C:A, 2:169197021:G:A, 2:169197028:T:C, 2:169197030:G:A, 2:169198801:T:G, 2:169198818:C:T, 2:169198845:T:C, 2:169198849:C:T, 2:169198849:C:A, 2:169198851:C:T, 2:169198852:G:A, 2:169198855:G:A, 2:169198894:A:G, 2:169198906:G:T, 2:169198906:G:A, 2:169201627:C:T, 2:169201669:T:C, 2:169201685:T:C, 2:169201694:G:A, 2:169201708:C:T, 2:169201738:T:C, 2:169201746:C:A, 2:169201780:C:A, 2:169201780:C:T, 2:169201798:T:C, 2:169201805:G:A, 2:169201825:C:A, 2:169201831:T:C, 2:169201835:C:A, 2:169201852:G:A, 2:169201868:G:A, 2:169202761:A:G, 2:169202770:A:G, 2:169202783:C:G, 2:169202789:C:T, 2:169202833:C:T, 2:169202834:G:A, 2:169202842:G:A, 2:169202863:C:A, 2:169202869:C:G, 2:169202869:C:T, 2:169202878:T:C, 2:169202904:G:T, 2:169202910:C:G, 2:169202932:G:A, 2:169202945:C:T, 2:169202950:C:T, 2:169203987:G:A, 2:169204036:A:T, 2:169204062:G:C, 2:169204062:G:T, 2:169204069:T:C, 2:169204074:C:T, 2:169204093:T:G, 2:169204095:G:A, 2:169204098:G:A, 2:169204113:C:T, 2:169204149:T:C, 2:169204160:G:T, 2:169204164:G:A, 2:169204165:T:C, 2:169204185:T:C, 2:169204186:A:G, 2:169204206:T:C, 2:169204207:G:A, 2:169204210:C:T, 2:169204218:T:C, 2:169204225:T:A, 2:169204233:C:T, 2:169204245:G:A, 2:169204245:G:T, 2:169204253:G:T, 2:169204266:C:G, 2:169204268:C:A, 2:169204270:G:T, 2:169205507:C:T, 2:169205533:C:T, 2:169205538:C:T, 2:169205540:T:C, 2:169205543:C:G, 2:169205567:C:T, 2:169205569:C:T, 2:169205572:A:G, 2:169205608:T:C, 2:169205609:G:A, 2:169205625:C:A, 2:169206028:G:C, 2:169206034:A:T, 2:169206036:C:G, 2:169206054:G:C, 2:169206063:C:T, 2:169206065:C:T, 2:169206066:G:A, 2:169206075:C:T, 2:169206080:C:T, 2:169206081:G:A, 2:169206107:T:A, 2:169206113:A:G, 2:169206126:A:G, 2:169206171:C:T, 2:169206173:T:C, 2:169206428:T:C, 2:169206432:T:C, 2:169206436:A:C, 2:169206450:G:C, 2:169206459:C:T, 2:169206477:T:C, 2:169206480:T:C, 2:169206482:T:G, 2:169206494:C:T, 2:169206507:G:C, 2:169206531:A:T, 2:169206561:C:A, 2:169206564:T:C, 2:169206570:T:C, 2:169206626:G:A, 2:169206631:C:A, 2:169206656:T:C, 2:169206660:A:G, 2:169206666:C:A, 2:169206713:C:T, 2:169206714:G:A, 2:169206737:A:G, 2:169206749:C:T, 2:169206773:A:G, 2:169206782:G:A, 2:169206782:G:C, 2:169206785:G:T, 2:169206800:G:T, 2:169206805:C:G, 2:169206812:G:T, 2:169206822:T:C, 2:169206829:C:A, 2:169206842:AC:A, 2:169206843:C:G, 2:169206843:C:T, 2:169206852:T:C, 2:169206875:C:T, 2:169206881:G:A, 2:169206888:G:T, 2:169206893:C:T, 2:169206905:C:T, 2:169206906:G:A, 2:169206935:C:T, 2:169206936:G:A, 2:169206938:A:G, 2:169206950:A:G, 2:169206954:C:G, 2:169206954:C:A, 2:169206963:C:T, 2:169206992:C:T, 2:169206993:G:A, 2:169207010:C:T, 2:169207022:A:G, 2:169207031:G:A, 2:169207046:C:T, 2:169207050:T:C, 2:169207056:A:C, 2:169207070:C:T, 2:169207124:G:A, 2:169207145:G:C, 2:169207167:G:A, 2:169207175:C:T, 2:169207176:G:A, 2:169207178:C:T, 2:169207189:A:T, 2:169207196:C:T, 2:169207197:G:A, 2:169207209:T:C, 2:169207247:T:G, 2:169207250:C:T, 2:169209453:C:T, 2:169209455:G:C, 2:169209503:T:C, 2:169209509:A:G, 2:169209512:A:G, 2:169209534:C:G, 2:169209548:C:T, 2:169209549:G:A, 2:169209567:C:T, 2:169209584:T:C, 2:169209627:G:A, 2:169209638:C:T, 2:169209643:T:C, 2:169211989:T:C, 2:169211992:T:A, 2:169212054:A:G, 2:169212058:A:T, 2:169212072:G:A, 2:169212082:G:A, 2:169212111:G:T, 2:169212112:C:T, 2:169212118:C:T, 2:169212127:A:G, 2:169212135:C:T, 2:169212136:C:G, 2:169212142:C:T, 2:169212154:T:A, 2:169212166:C:T, 2:169212176:G:T, 2:169212179:G:T, 2:169212187:C:T, 2:169212202:C:T, 2:169213659:C:T, 2:169213660:G:A, 2:169213680:C:A, 2:169213681:C:T, 2:169213686:A:G, 2:169213693:G:A, 2:169213693:G:T, 2:169213712:T:C, 2:169213718:G:T, 2:169213760:C:A, 2:169213821:T:C, 2:169213822:G:A, 2:169213827:A:C, 2:169213841:A:C, 2:169213852:C:T, 2:169213855:C:T, 2:169216294:C:T, 2:169216298:G:C, 2:169216303:G:C, 2:169216336:T:G, 2:169216347:T:G, 2:169216360:C:T, 2:169216377:G:C, 2:169216378:C:T, 2:169216393:C:T, 2:169216412:G:C, 2:169220476:T:C, 2:169220481:A:G, 2:169220485:G:C, 2:169220541:A:G, 2:169220565:T:C, 2:169225325:T:A, 2:169225330:G:A, 2:169225338:G:T, 2:169225384:G:T, 2:169225390:C:T, 2:169225420:T:C, 2:169225433:C:A, 2:169225441:T:C, 2:169226447:T:A, 2:169226454:C:A, 2:169226454:C:T, 2:169226456:T:C, 2:169226502:C:A, 2:169226518:C:A, 2:169226523:C:T, 2:169226525:T:C, 2:169226575:G:C, 2:169226583:G:T, 2:169231774:A:G, 2:169231809:T:C, 2:169231818:C:T, 2:169231819:G:A, 2:169231834:G:A, 2:169231840:C:T, 2:169233413:T:C, 2:169233414:T:C, 2:169233437:G:A, 2:169233443:A:G, 2:169233461:A:G, 2:169233470:A:T, 2:169233504:T:C, 2:169233518:C:T, 2:169233519:G:A, 2:169233521:C:T, 2:169233530:C:T, 2:169233531:G:A, 2:169233581:C:T, 2:169233582:G:A, 2:169233583:T:C, 2:169233585:T:C, 2:169235847:C:T, 2:169235865:C:T, 2:169235866:G:A, 2:169235871:T:C, 2:169235896:T:A, 2:169235905:G:T, 2:169235911:A:T, 2:169235916:A:G, 2:169235946:A:G, 2:169235947:T:C, 2:169235956:C:T, 2:169235963:C:G, 2:169235965:A:G, 2:169235994:C:T, 2:169235997:A:G, 2:169236036:T:C, 2:169236049:A:C, 2:169237105:C:T, 2:169237113:G:C, 2:169237151:C:A, 2:169237153:A:C, 2:169237167:T:C, 2:169237169:T:C, 2:169237181:A:G, 2:169237184:T:C, 2:169237190:A:G, 2:169237197:T:C, 2:169237232:C:T, 2:169237233:G:A, 2:169237245:C:T, 2:169237247:A:G, 2:169237250:G:A, 2:169238089:A:G, 2:169238095:C:G, 2:169238099:T:C, 2:169238104:G:A, 2:169238113:T:C, 2:169238119:G:A, 2:169238122:C:T, 2:169238161:C:T, 2:169238166:A:C, 2:169238203:C:A, 2:169238252:C:T, 2:169238258:T:G, 2:169238278:A:G, 2:169239571:G:A, 2:169239586:C:T, 2:169239587:G:A, 2:169239623:A:G, 2:169239634:A:C, 2:169239640:C:T, 2:169239644:C:T, 2:169239646:T:G, 2:169239673:T:C, 2:169239680:G:T, 2:169239700:A:T, 2:169239701:G:T, 2:169239760:G:A, 2:169240944:T:C, 2:169240951:G:T, 2:169240963:A:G, 2:169240976:C:T, 2:169240976:C:G, 2:169240990:C:A, 2:169241000:A:T, 2:169241009:T:G, 2:169241014:T:C, 2:169241018:G:T, 2:169241019:G:T, 2:169241022:G:T, 2:169241075:G:A, 2:169241101:C:T, 2:169241101:C:G, 2:169241102:G:A, 2:169241108:G:T, 2:169241124:C:G, 2:169241129:C:T, 2:169241143:C:A, 2:169241144:C:T, 2:169241156:C:T, 2:169241158:C:T, 2:169241230:G:A, 2:169241239:G:A, 2:169241260:T:C, 2:169241263:A:T, 2:169241279:C:T, 2:169241281:T:C, 2:169241289:C:A, 2:169241296:T:C, 2:169241299:G:T, 2:169241309:T:C, 2:169241311:C:A, 2:169241312:C:A, 2:169241325:C:A, 2:169241326:T:C, 2:169241342:G:A, 2:169241359:C:T, 2:169241360:T:C, 2:169242956:G:C, 2:169242956:G:A, 2:169242961:C:A, 2:169242964:G:C, 2:169242964:G:A, 2:169242973:G:A, 2:169242989:C:CA, 2:169243016:C:T, 2:169243033:C:T, 2:169243040:C:A, 2:169243047:G:C, 2:169243060:G:T, 2:169243447:T:A, 2:169243459:G:A, 2:169243465:T:C, 2:169243472:A:G, 2:169243474:C:T, 2:169243478:G:A, 2:169243480:T:C, 2:169243489:T:A, 2:169243503:T:A, 2:169243514:C:G, 2:169243519:G:A, 2:169244716:T:C, 2:169244744:C:T, 2:169244759:T:C, 2:169244768:G:T, 2:169244783:A:T, 2:169244810:C:T, 2:169244812:T:G, 2:169244812:T:C, 2:169244828:G:A, 2:169244846:C:A, 2:169244857:C:T, 2:169244858:G:A, 2:169244869:C:T, 2:169244870:G:T, 2:169244874:G:T, 2:169244890:T:G, 2:169244911:G:A, 2:169244914:G:A, 2:169244932:T:A, 2:169246705:T:C, 2:169246713:C:G, 2:169246741:G:C, 2:169246750:C:T, 2:169246767:T:C, 2:169246773:T:C, 2:169246795:T:C, 2:169246815:C:G, 2:169246815:C:A, 2:169246820:C:G, 2:169246827:G:A, 2:169246855:C:T, 2:169246882:T:C, 2:169246893:G:C, 2:169246899:C:G, 2:169246902:C:A, 2:169246906:C:T, 2:169246908:C:A, 2:169246926:G:A, 2:169246947:T:C, 2:169246951:C:T, 2:169246960:G:A, 2:169246965:G:T, 2:169246971:T:C, 2:169246978:C:T, 2:169247382:C:A, 2:169247389:T:C, 2:169247395:T:C, 2:169247401:G:A, 2:169247426:T:C, 2:169247446:A:T, 2:169247452:C:A, 2:169247473:C:T, 2:169247479:A:G, 2:169247501:T:C, 2:169247504:A:C, 2:169247512:T:C, 2:169256129:G:A, 2:169256132:T:G, 2:169256142:G:T, 2:169256150:T:C, 2:169256152:GC:G, 2:169256169:C:T, 2:169256187:T:C, 2:169256188:G:C, 2:169257124:G:A, 2:169257126:C:T, 2:169257131:C:T, 2:169257137:C:A, 2:169257142:C:T, 2:169257160:G:C, 2:169257164:T:C, 2:169257191:C:T, 2:169257199:C:A, 2:169257205:CT:C, 2:169257223:C:T, 2:169257224:G:A, 2:169257225:G:C, 2:169257229:C:A, 2:169257233:C:T, 2:169259052:C:T, 2:169259053:G:A, 2:169259062:T:A, 2:169259082:C:T, 2:169259082:C:A, 2:169259083:G:A, 2:169259088:G:A, 2:169259093:A:T, 2:169259098:C:G, 2:169259103:C:T, 2:169259116:T:C, 2:169259134:C:G, 2:169259140:A:C, 2:169259162:A:C, 2:169259178:T:C, 2:169259179:C:T, 2:169259196:T:C, 2:169259203:C:T, 2:169270923:C:G, 2:169270948:T:C, 2:169270949:C:T, 2:169270949:C:G, 2:169270976:C:A, 2:169270976:C:T, 2:169270991:C:T, 2:169271014:G:A, 2:169271018:C:T, 2:169271021:G:A, 2:169271024:C:A, 2:169271026:A:G, 2:169271042:T:C, 2:169271050:G:A, 2:169271056:G:A, 2:169271065:C:T, 2:169271066:G:A, 2:169271069:T:C, 2:169271069:T:G, 2:169271080:G:A, 2:169272930:T:C, 2:169272938:C:T, 2:169272939:G:T, 2:169272939:G:A, 2:169272980:C:T, 2:169272981:G:A, 2:169273005:T:C, 2:169273008:T:C, 2:169273019:A:G, 2:169273045:G:T, 2:169273058:G:A, 2:169275035:C:T, 2:169275038:T:C, 2:169275038:T:A, 2:169275048:T:C, 2:169275074:T:C, 2:169275078:G:A, 2:169275092:T:C, 2:169275103:T:A, 2:169275105:G:C, 2:169275107:G:T, 2:169275110:T:C, 2:169275125:T:C, 2:169275172:C:G, 2:169275209:A:G, 2:169275219:C:T, 2:169275221:C:T, 2:169275230:A:G, 2:169275233:G:A, 2:169275233:G:T, 2:169277751:A:G, 2:169277757:T:C, 2:169277766:A:G, 2:169277775:A:G, 2:169277788:G:A, 2:169277808:C:T, 2:169277814:G:A, 2:169277816:T:C, 2:169277823:T:C, 2:169277869:C:A, 2:169277875:G:A, 2:169277876:G:T, 2:169277878:T:C, 2:169277910:G:C, 2:169277917:C:G, 2:169277924:G:T, 2:169277924:G:C, 2:169277938:A:G, 2:169279371:C:T, 2:169279382:G:A, 2:169279388:C:T, 2:169279400:T:C, 2:169279420:G:C, 2:169279435:C:T, 2:169279436:G:A, 2:169279459:A:G, 2:169279466:T:C, 2:169279468:C:T, 2:169279469:G:A, 2:169279502:T:G, 2:169279504:T:G, 2:169279510:C:A, 2:169279531:G:A, 2:169279536:T:G, 2:169279541:C:T, 2:169279543:G:A, 2:169279549:T:C, 2:169279550:T:C, 2:169279563:G:C, 2:169279591:A:T, 2:169280381:C:A, 2:169280411:A:C, 2:169280412:C:T, 2:169280423:C:T, 2:169280448:G:A, 2:169280457:T:A, 2:169280472:C:A, 2:169280486:C:T, 2:169280502:T:C, 2:169280511:C:G, 2:169280514:C:G, 2:169282876:A:C, 2:169282877:A:C, 2:169282878:T:A, 2:169282893:T:C, 2:169282904:C:G, 2:169282929:T:C, 2:169282941:C:T, 2:169282950:C:T, 2:169282998:A:T, 2:169289037:C:T, 2:169289046:T:C, 2:169289052:T:C, 2:169289082:G:A, 2:169289083:C:T, 2:169289092:A:G, 2:169289094:G:A, 2:169289094:G:T, 2:169289097:G:A, 2:169289139:G:A, 2:169289145:C:T, 2:169290857:C:T, 2:169290859:G:A, 2:169290873:T:G, 2:169290932:A:G, 2:169290940:G:A, 2:169290985:T:C, 2:169290986:G:A, 2:169290992:C:T, 2:169292258:C:A, 2:169292267:T:C, 2:169292271:C:T, 2:169292277:C:A, 2:169292294:C:T, 2:169292324:C:T, 2:169292325:G:A, 2:169292329:A:T, 2:169292331:T:C, 2:169292334:G:A, 2:169292355:C:T, 2:169292363:G:A, 2:169294166:T:C, 2:169294183:T:A, 2:169294204:G:C, 2:169294207:C:T, 2:169294216:C:T, 2:169294220:C:T, 2:169294234:G:A, 2:169294241:C:T, 2:169294255:A:G, 2:169294603:A:G, 2:169294620:G:A, 2:169294635:A:T, 2:169294645:C:G, 2:169294647:C:G, 2:169294650:T:G, 2:169294659:G:A, 2:169294665:T:C, 2:169294671:G:T, 2:169294671:G:A, 2:169294679:G:T, 2:169294711:C:A, 2:169307305:C:T, 2:169307312:G:C, 2:169307315:T:G, 2:169307329:A:G, 2:169307346:A:G, 2:169307361:G:A, 2:169307373:T:G, 2:169307376:T:C, 2:169318773:C:T, 2:169318789:C:G, 2:169318825:T:C, 2:169318839:C:G, 2:169318842:T:A, 2:169318851:C:A, 2:169318879:C:A, 2:169318884:G:A, 2:169320794:G:A, 2:169320795:C:T, 2:169320795:C:A, 2:169320818:C:T, 2:169320826:C:A, 2:169320827:C:T, 2:169320849:G:A, 2:169320863:C:T, 2:169320864:G:A, 2:169320868:A:C, 2:169320872:G:A, 2:169320872:G:T, 2:169320875:C:T, 2:169362338:G:T, 2:169362348:C:G, 2:169362374:G:A, 2:169362390:C:A, 2:169128668:C:G, 2:169128689:G:A, 2:169128690:A:T, 2:169128695:C:T, 2:169128710:T:A, 2:169128778:G:A, 2:169128781:G:A, 2:169128787:G:A, 2:169128827:C:A, 2:169128828:C:T, 2:169129014:T:C, 2:169129020:T:A, 2:169129056:T:C, 2:169129062:T:G, 2:169132622:C:A, 2:169132650:T:C, 2:169132659:T:A, 2:169137390:A:G, 2:169137391:C:A, 2:169137464:C:G, 2:169137477:A:G, 2:169138578:A:G, 2:169138585:T:C, 2:169138597:T:C, 2:169138617:C:A, 2:169138636:T:C, 2:169138645:C:G, 2:169138693:C:T, 2:169138693:C:G, 2:169138699:T:C, 2:169138701:C:T, 2:169139259:C:G, 2:169139296:T:A, 2:169139338:A:G, 2:169139345:G:A, 2:169139366:C:T, 2:169139579:C:T, 2:169139600:C:T, 2:169140475:C:G, 2:169140480:C:T, 2:169140489:A:C, 2:169140498:C:T, 2:169140502:C:T, 2:169140504:T:C, 2:169140510:T:A, 2:169140514:T:TG, 2:169140516:G:C, 2:169140521:G:A, 2:169140524:A:G, 2:169142697:C:T, 2:169142719:G:T, 2:169145777:T:C, 2:169145826:TC:T, 2:169145834:C:T, 2:169145877:C:G, 2:169146798:T:C, 2:169146825:T:C, 2:169146874:C:T, 2:169146896:C:G, 2:169146898:C:G, 2:169146953:C:T, 2:169150910:T:C, 2:169150980:T:C, 2:169150987:C:G, 2:169150995:G:T, 2:169150995:G:A, 2:169152839:C:T, 2:169152875:T:C, 2:169152880:C:T, 2:169152881:G:A, 2:169152910:C:T, 2:169152911:G:A, 2:169152917:T:C, 2:169154473:C:G, 2:169154528:T:G, 2:169154561:C:T, 2:169154567:C:T, 2:169154570:A:G, 2:169154573:T:C, 2:169154594:G:A, 2:169156306:C:T, 2:169156307:T:A, 2:169156407:T:C, 2:169157379:G:A, 2:169157400:G:T, 2:169157404:C:G, 2:169157405:G:T, 2:169157413:C:T, 2:169157487:C:T, 2:169162489:G:A, 2:169162508:C:T, 2:169162549:T:A, 2:169162549:T:C, 2:169165973:A:C, 2:169165976:C:A, 2:169166007:G:A, 2:169166021:C:T, 2:169166022:G:A, 2:169166027:C:T, 2:169166053:C:G, 2:169168551:G:A, 2:169168569:C:T, 2:169168613:C:T, 2:169168620:G:C, 2:169168632:C:T, 2:169168643:G:A, 2:169168653:A:C, 2:169168670:C:T, 2:169168671:G:A, 2:169169723:C:T, 2:169169734:T:C, 2:169169738:C:T, 2:169169778:A:T, 2:169170560:G:A, 2:169170585:G:C, 2:169170596:C:T, 2:169170603:C:A, 2:169170608:G:A, 2:169170610:G:A, 2:169170643:T:A, 2:169170644:C:T, 2:169170652:G:C, 2:169170652:G:T, 2:169170661:C:A, 2:169172067:C:A, 2:169172071:C:T, 2:169172075:G:A, 2:169172081:T:C, 2:169172081:T:A, 2:169172101:C:T, 2:169172102:G:A, 2:169172120:G:A, 2:169172128:C:G, 2:169172134:T:A, 2:169173113:C:T, 2:169173117:T:C, 2:169173147:C:T, 2:169173167:C:T, 2:169173168:G:A, 2:169173224:A:G, 2:169173930:A:G, 2:169173948:T:G, 2:169173951:C:T, 2:169173987:G:A, 2:169173991:T:C, 2:169173996:C:T, 2:169174011:C:T, 2:169174012:G:A, 2:169174023:G:A, 2:169174027:G:A, 2:169174039:T:C, 2:169174050:G:A, 2:169174081:C:T, 2:169174086:A:T, 2:169174119:C:T, 2:169174120:G:A, 2:169174128:G:A, 2:169174129:C:T, 2:169174130:G:T, 2:169174143:T:C, 2:169175205:G:A, 2:169175250:A:T, 2:169175258:G:A, 2:169175264:G:A, 2:169175270:T:C, 2:169175300:C:T, 2:169175301:G:A, 2:169175310:G:A, 2:169175315:G:A, 2:169175328:G:T, 2:169176423:G:A, 2:169176434:C:G, 2:169176434:C:A, 2:169176435:T:C, 2:169176436:G:T, 2:169176439:T:G, 2:169176451:T:G, 2:169176490:G:A, 2:169176508:C:T, 2:169176520:C:G, 2:169176540:A:T, 2:169176579:G:A, 2:169177866:G:T, 2:169177884:C:T, 2:169177889:T:A, 2:169177913:C:T, 2:169177914:T:C, 2:169177957:A:C, 2:169177959:T:C, 2:169177962:C:T, 2:169177970:T:C, 2:169177982:C:T, 2:169177985:T:A, 2:169177994:G:A, 2:169177994:G:C, 2:169181452:T:C, 2:169181460:A:G, 2:169181473:C:T, 2:169181487:T:G, 2:169181490:T:C, 2:169181581:T:C, 2:169181587:C:T, 2:169181590:G:A, 2:169181595:C:T, 2:169181597:C:G, 2:169181609:G:T, 2:169181614:G:A, 2:169182218:T:C, 2:169182221:T:C, 2:169182251:C:T, 2:169182252:G:A, 2:169182254:C:T, 2:169182255:G:A, 2:169182264:C:T, 2:169182266:T:C, 2:169182270:G:A, 2:169182276:A:T, 2:169182299:G:T, 2:169182307:C:A, 2:169182315:G:A, 2:169182315:G:T, 2:169185504:T:C, 2:169185525:G:T, 2:169185536:G:A, 2:169185537:C:G, 2:169185539:G:A, 2:169185561:T:C, 2:169185572:G:T, 2:169185583:A:T, 2:169185590:C:G, 2:169185617:A:G, 2:169185641:C:T, 2:169185666:T:C, 2:169185687:G:A, 2:169185698:T:C, 2:169185725:T:A, 2:169185731:C:T, 2:169185734:T:C, 2:169185735:T:C, 2:169185756:C:T, 2:169185773:C:T, 2:169185774:G:A, 2:169185809:G:A, 2:169185812:G:A, 2:169185825:T:C, 2:169185856:G:T, 2:169185858:T:C, 2:169185870:G:T, 2:169185871:C:T, 2:169185890:A:G, 2:169185905:C:G, 2:169185906:G:A, 2:169185916:C:T, 2:169185922:C:A, 2:169185981:C:T, 2:169186012:A:C, 2:169186019:C:A, 2:169186020:C:A, 2:169187987:C:T, 2:169188005:T:A, 2:169188008:A:G, 2:169188014:T:C, 2:169188042:G:A, 2:169188062:T:C, 2:169188074:C:A, 2:169188086:G:C, 2:169188134:T:C, 2:169188165:T:C, 2:169188170:C:T, 2:169188171:G:A, 2:169188174:C:T, 2:169188185:G:A, 2:169188207:T:C, 2:169188221:C:G, 2:169188224:C:A, 2:169188234:T:C, 2:169188248:T:C, 2:169188258:G:A, 2:169188266:C:T, 2:169191836:A:G, 2:169191857:C:T, 2:169191874:T:C, 2:169191903:A:C, 2:169191923:C:T, 2:169191982:G:A, 2:169192010:C:T, 2:169192016:C:A, 2:169192018:G:A, 2:169193760:C:T, 2:169193782:C:T, 2:169193787:C:A, 2:169193799:C:T, 2:169193806:T:C, 2:169193811:C:G, 2:169193812:C:T, 2:169193827:C:T, 2:169193847:C:A, 2:169193849:A:C, 2:169196923:G:T, 2:169196980:T:C, 2:169196985:C:T, 2:169196986:G:A, 2:169197006:T:G, 2:169197015:C:A, 2:169197018:C:A, 2:169197021:G:A, 2:169198801:T:G, 2:169198818:C:T, 2:169198845:T:C, 2:169198851:C:T, 2:169198852:G:A, 2:169198855:G:A, 2:169198906:G:T, 2:169198906:G:A, 2:169201627:C:T, 2:169201669:T:C, 2:169201685:T:C, 2:169201694:G:A, 2:169201708:C:T, 2:169201738:T:C, 2:169201746:C:A, 2:169201780:C:A, 2:169201780:C:T, 2:169201798:T:C, 2:169201805:G:A, 2:169201825:C:A, 2:169201831:T:C, 2:169201852:G:A, 2:169202761:A:G, 2:169202783:C:G, 2:169202789:C:T, 2:169202833:C:T, 2:169202834:G:A, 2:169202869:C:G, 2:169202869:C:T, 2:169202878:T:C, 2:169202904:G:T, 2:169202910:C:G, 2:169202932:G:A, 2:169202945:C:T, 2:169202950:C:T, 2:169203987:G:A, 2:169204036:A:T, 2:169204062:G:C, 2:169204062:G:T, 2:169204069:T:C, 2:169204093:T:G, 2:169204113:C:T, 2:169204160:G:T, 2:169204164:G:A, 2:169204165:T:C, 2:169204185:T:C, 2:169204186:A:G, 2:169204225:T:A, 2:169204233:C:T, 2:169204245:G:A, 2:169204245:G:T, 2:169204253:G:T, 2:169204266:C:G, 2:169204268:C:A, 2:169204270:G:T, 2:169205538:C:T, 2:169205540:T:C, 2:169205543:C:G, 2:169205569:C:T, 2:169205572:A:G, 2:169205625:C:A, 2:169206028:G:C, 2:169206034:A:T, 2:169206036:C:G, 2:169206054:G:C, 2:169206063:C:T, 2:169206065:C:T, 2:169206066:G:A, 2:169206075:C:T, 2:169206080:C:T, 2:169206081:G:A, 2:169206107:T:A, 2:169206126:A:G, 2:169206171:C:T, 2:169206173:T:C, 2:169206428:T:C, 2:169206450:G:C, 2:169206477:T:C, 2:169206494:C:T, 2:169206507:G:C, 2:169206531:A:T, 2:169206561:C:A, 2:169206570:T:C, 2:169206626:G:A, 2:169206631:C:A, 2:169206656:T:C, 2:169206660:A:G, 2:169206666:C:A, 2:169206713:C:T, 2:169206714:G:A, 2:169206737:A:G, 2:169206749:C:T, 2:169206773:A:G, 2:169206782:G:C, 2:169206782:G:A, 2:169206800:G:T, 2:169206805:C:G, 2:169206812:G:T, 2:169206829:C:A, 2:169206842:AC:A, 2:169206843:C:T, 2:169206843:C:G, 2:169206852:T:C, 2:169206862:A:T, 2:169206870:T:C, 2:169206875:C:T, 2:169206881:G:A, 2:169206888:G:T, 2:169206893:C:T, 2:169206905:C:T, 2:169206906:G:A, 2:169206936:G:A, 2:169206938:A:G, 2:169206950:A:G, 2:169206954:C:A, 2:169206954:C:G, 2:169206963:C:T, 2:169206992:C:T, 2:169206993:G:A, 2:169207010:C:T, 2:169207022:A:G, 2:169207031:G:A, 2:169207046:C:T, 2:169207050:T:C, 2:169207056:A:C, 2:169207070:C:T, 2:169207124:G:A, 2:169207145:G:C, 2:169207167:G:A, 2:169207175:C:T, 2:169207176:G:A, 2:169207178:C:T, 2:169207189:A:T, 2:169207196:C:T, 2:169207197:G:A, 2:169207209:T:C, 2:169207247:T:G, 2:169207250:C:T, 2:169209453:C:T, 2:169209455:G:C, 2:169209509:A:G, 2:169209512:A:G, 2:169209534:C:G, 2:169209548:C:T, 2:169209549:G:A, 2:169209584:T:C, 2:169209627:G:A, 2:169209638:C:T, 2:169209643:T:C, 2:169211989:T:C, 2:169211992:T:A, 2:169212054:A:G, 2:169212058:A:T, 2:169212072:G:A, 2:169212082:G:A, 2:169212088:C:T, 2:169212111:G:T, 2:169212112:C:T, 2:169212118:C:T, 2:169212127:A:G, 2:169212135:C:T, 2:169212136:C:G, 2:169212154:T:A, 2:169212166:C:T, 2:169212176:G:T, 2:169212179:G:T, 2:169212187:C:T, 2:169213660:G:A, 2:169213681:C:T, 2:169213686:A:G, 2:169213693:G:A, 2:169213693:G:T, 2:169213712:T:C, 2:169213718:G:T, 2:169213822:G:A, 2:169213827:A:C, 2:169213852:C:T, 2:169213855:C:T, 2:169216298:G:C, 2:169216303:G:C, 2:169216336:T:G, 2:169216360:C:T, 2:169216377:G:C, 2:169216378:C:T, 2:169216412:G:C, 2:169220476:T:C, 2:169220481:A:G, 2:169220485:G:C, 2:169220565:T:C, 2:169225330:G:A, 2:169225420:T:C, 2:169225433:C:A, 2:169225441:T:C, 2:169226426:T:C, 2:169226447:T:A, 2:169226456:T:C, 2:169226502:C:A, 2:169226518:C:A, 2:169226523:C:T, 2:169226525:T:C, 2:169226575:G:C, 2:169231774:A:G, 2:169231809:T:C, 2:169231819:G:A, 2:169231834:G:A, 2:169233437:G:A, 2:169233443:A:G, 2:169233461:A:G, 2:169233470:A:T, 2:169233504:T:C, 2:169233519:G:A, 2:169233530:C:T, 2:169233531:G:A, 2:169233582:G:A, 2:169233583:T:C, 2:169235847:C:T, 2:169235865:C:T, 2:169235866:G:A, 2:169235905:G:T, 2:169235911:A:T, 2:169235946:A:G, 2:169235947:T:C, 2:169235956:C:T, 2:169235963:C:G, 2:169235965:A:G, 2:169235994:C:T, 2:169236049:A:C, 2:169237113:G:C, 2:169237151:C:A, 2:169237153:A:C, 2:169237167:T:C, 2:169237169:T:C, 2:169237181:A:G, 2:169237184:T:C, 2:169237190:A:G, 2:169237197:T:C, 2:169237232:C:T, 2:169237233:G:A, 2:169237245:C:T, 2:169237247:A:G, 2:169237250:G:A, 2:169238089:A:G, 2:169238095:C:G, 2:169238099:T:C, 2:169238104:G:A, 2:169238113:T:C, 2:169238119:G:A, 2:169238122:C:T, 2:169238161:C:T, 2:169238166:A:C, 2:169238203:C:A, 2:169238246:C:A, 2:169238252:C:T, 2:169238258:T:G, 2:169238278:A:G, 2:169239571:G:A, 2:169239586:C:T, 2:169239587:G:A, 2:169239623:A:G, 2:169239640:C:T, 2:169239644:C:T, 2:169239646:T:G, 2:169239673:T:C, 2:169239680:G:T, 2:169239760:G:A, 2:169240944:T:C, 2:169240951:G:T, 2:169240963:A:G, 2:169240976:C:G, 2:169240976:C:T, 2:169240990:C:A, 2:169241000:A:T, 2:169241009:T:G, 2:169241014:T:C, 2:169241018:G:T, 2:169241019:G:T, 2:169241022:G:T, 2:169241075:G:A, 2:169241101:C:T, 2:169241101:C:G, 2:169241102:G:A, 2:169241108:G:T, 2:169241124:C:G, 2:169241129:C:T, 2:169241143:C:A, 2:169241156:C:T, 2:169241158:C:T, 2:169241230:G:A, 2:169241239:G:A, 2:169241260:T:C, 2:169241263:A:T, 2:169241279:C:T, 2:169241281:T:C, 2:169241289:C:A, 2:169241299:G:T, 2:169241311:C:A, 2:169241312:C:A, 2:169241325:C:A, 2:169241326:T:C, 2:169241342:G:A, 2:169241359:C:T, 2:169241360:T:C, 2:169242956:G:A, 2:169242956:G:C, 2:169242961:C:A, 2:169242964:G:C, 2:169242973:G:A, 2:169242989:C:CA, 2:169243033:C:T, 2:169243040:C:A, 2:169243047:G:C, 2:169243060:G:T, 2:169243447:T:A, 2:169243465:T:C, 2:169243472:A:G, 2:169243474:C:T, 2:169243478:G:A, 2:169243480:T:C, 2:169243489:T:A, 2:169243501:G:A, 2:169244716:T:C, 2:169244744:C:T, 2:169244759:T:C, 2:169244783:A:T, 2:169244858:G:A, 2:169244869:C:T, 2:169244870:G:T, 2:169244890:T:G, 2:169244911:G:A, 2:169244932:T:A, 2:169246705:T:C, 2:169246713:C:G, 2:169246741:G:C, 2:169246750:C:T, 2:169246767:T:C, 2:169246815:C:A, 2:169246815:C:G, 2:169246820:C:G, 2:169246855:C:T, 2:169246882:T:C, 2:169246893:G:C, 2:169246899:C:G, 2:169246902:C:A, 2:169246906:C:T, 2:169246908:C:A, 2:169246926:G:A, 2:169246947:T:C, 2:169246951:C:T, 2:169246960:G:A, 2:169246962:G:A, 2:169246965:G:T, 2:169246971:T:C, 2:169246978:C:T, 2:169247382:C:A, 2:169247395:T:C, 2:169247401:G:A, 2:169247426:T:C, 2:169247446:A:T, 2:169247452:C:A, 2:169247473:C:T, 2:169247479:A:G, 2:169247501:T:C, 2:169247504:A:C, 2:169256129:G:A, 2:169256132:T:G, 2:169256142:G:T, 2:169256152:GC:G, 2:169256169:C:T, 2:169256187:T:C, 2:169256188:G:C, 2:169257124:G:A, 2:169257126:C:T, 2:169257131:C:T, 2:169257137:C:A, 2:169257142:C:T, 2:169257160:G:C, 2:169257164:T:C, 2:169257191:C:T, 2:169257199:C:A, 2:169257205:CT:C, 2:169257223:C:T, 2:169257224:G:A, 2:169257225:G:C, 2:169257229:C:A, 2:169257233:C:T, 2:169259052:C:T, 2:169259053:G:A, 2:169259062:T:A, 2:169259082:C:T, 2:169259082:C:A, 2:169259083:G:A, 2:169259088:G:A, 2:169259093:A:T, 2:169259098:C:G, 2:169259116:T:C, 2:169259134:C:G, 2:169259140:A:C, 2:169259162:A:C, 2:169259178:T:C, 2:169259179:C:T, 2:169259196:T:C, 2:169270923:C:G, 2:169270948:T:C, 2:169270949:C:G, 2:169270949:C:T, 2:169270976:C:T, 2:169270976:C:A, 2:169270991:C:T, 2:169271014:G:A, 2:169271018:C:T, 2:169271021:G:A, 2:169271024:C:A, 2:169271026:A:G, 2:169271046:C:A, 2:169271056:G:A, 2:169271065:C:T, 2:169271066:G:A, 2:169271069:T:G, 2:169271069:T:C, 2:169271080:G:A, 2:169272939:G:T, 2:169272939:G:A, 2:169272980:C:T, 2:169272981:G:A, 2:169273005:T:C, 2:169273008:T:C, 2:169273019:A:G, 2:169273045:G:T, 2:169273058:G:A, 2:169275035:C:T, 2:169275038:T:C, 2:169275048:T:C, 2:169275074:T:C, 2:169275078:G:A, 2:169275103:T:A, 2:169275107:G:T, 2:169275110:T:C, 2:169275125:T:C, 2:169275209:A:G, 2:169275219:C:T, 2:169275221:C:T, 2:169275230:A:G, 2:169275233:G:A, 2:169275233:G:T, 2:169277751:A:G, 2:169277757:T:C, 2:169277766:A:G, 2:169277775:A:G, 2:169277788:G:A, 2:169277808:C:T, 2:169277814:G:A, 2:169277823:T:C, 2:169277869:C:A, 2:169277875:G:A, 2:169277876:G:T, 2:169277878:T:C, 2:169277910:G:C, 2:169277917:C:G, 2:169277924:G:T, 2:169277924:G:C, 2:169277938:A:G, 2:169279371:C:T, 2:169279382:G:A, 2:169279388:C:T, 2:169279400:T:C, 2:169279420:G:C, 2:169279435:C:T, 2:169279436:G:A, 2:169279459:A:G, 2:169279466:T:C, 2:169279468:C:T, 2:169279469:G:A, 2:169279502:T:G, 2:169279504:T:G, 2:169279510:C:A, 2:169279531:G:A, 2:169279541:C:T, 2:169279543:G:A, 2:169279549:T:C, 2:169279550:T:C, 2:169279563:G:C, 2:169279591:A:T, 2:169280381:C:A, 2:169280411:A:C, 2:169280412:C:T, 2:169280423:C:T, 2:169280448:G:A, 2:169280457:T:A, 2:169280472:C:A, 2:169280486:C:T, 2:169280502:T:C, 2:169282876:A:C, 2:169282893:T:C, 2:169282904:C:G, 2:169282950:C:T, 2:169282998:A:T, 2:169289037:C:T, 2:169289046:T:C, 2:169289052:T:C, 2:169289094:G:A, 2:169289094:G:T, 2:169289097:G:A, 2:169289139:G:A, 2:169289145:C:T, 2:169290857:C:T, 2:169290859:G:A, 2:169290873:T:G, 2:169290932:A:G, 2:169290940:G:A, 2:169290986:G:A, 2:169292258:C:A, 2:169292267:T:C, 2:169292271:C:T, 2:169292277:C:A, 2:169292294:C:T, 2:169292324:C:T, 2:169292325:G:A, 2:169292329:A:T, 2:169292334:G:A, 2:169292363:G:A, 2:169294166:T:C, 2:169294216:C:T, 2:169294220:C:T, 2:169294234:G:A, 2:169294241:C:T, 2:169294603:A:G, 2:169294635:A:T, 2:169294645:C:G, 2:169294647:C:G, 2:169294650:T:G, 2:169294665:T:C, 2:169294671:G:A, 2:169294671:G:T, 2:169294711:C:A, 2:169307305:C:T, 2:169307312:G:C, 2:169307329:A:G, 2:169307346:A:G, 2:169307361:G:A, 2:169307373:T:G, 2:169318789:C:G, 2:169318839:C:G, 2:169318842:T:A, 2:169318851:C:A, 2:169318884:G:A, 2:169320794:G:A, 2:169320815:G:C, 2:169320818:C:T, 2:169320826:C:A, 2:169320827:C:T, 2:169320863:C:T, 2:169320864:G:A, 2:169320875:C:T, 2:169362348:C:G, 2:169362390:C:A, 2:169128692:T:C, 2:169128725:A:T, 2:169128741:G:GTCTC, 2:169128751:G:A, 2:169128758:G:A, 2:169128784:G:A, 2:169128811:T:C, 2:169128819:C:G, 2:169128823:T:A, 2:169129017:G:A, 2:169129027:G:T, 2:169129048:G:T, 2:169129051:T:C, 2:169129059:C:T, 2:169129060:G:A, 2:169129070:A:T, 2:169129071:T:C, 2:169129075:A:G, 2:169132608:G:T, 2:169132630:G:A, 2:169132638:G:T, 2:169132638:G:A, 2:169132641:C:T, 2:169132647:T:C, 2:169132648:A:G, 2:169132652:C:G, 2:169132660:C:T, 2:169132661:CA:C, 2:169132664:AT:A, 2:169132672:A:G, 2:169137397:T:C, 2:169137405:AC:A, 2:169137429:G:A, 2:169137457:T:C, 2:169137482:A:T, 2:169137489:T:A, 2:169138581:G:T, 2:169138583:C:T, 2:169138587:G:A, 2:169138590:C:A, 2:169138611:C:A, 2:169138635:A:G, 2:169138639:T:C, 2:169138642:G:C, 2:169138655:T:A, 2:169138687:G:A, 2:169139250:C:T, 2:169139273:G:A, 2:169139296:T:C, 2:169139369:C:T, 2:169139545:G:T, 2:169139552:G:A, 2:169139572:G:A, 2:169139602:C:A, 2:169140464:G:A, 2:169140500:T:C, 2:169140509:C:T, 2:169140514:TG:T, 2:169140516:G:A, 2:169140528:T:C, 2:169142776:G:T, 2:169145797:G:C, 2:169145840:T:A, 2:169145889:G:T, 2:169145907:G:C, 2:169145924:C:T, 2:169146779:T:C, 2:169146793:C:T, 2:169146801:T:G, 2:169146829:T:C, 2:169146883:G:C, 2:169146888:T:C, 2:169146889:T:C, 2:169146908:C:A, 2:169146941:G:T, 2:169146947:C:G, 2:169146955:T:A, 2:169150901:A:T, 2:169150933:G:C, 2:169150939:G:T, 2:169150965:A:G, 2:169150994:C:A, 2:169150994:C:T, 2:169151007:C:T, 2:169151012:G:A, 2:169151022:T:C, 2:169152821:T:C, 2:169152827:C:T, 2:169152839:C:G, 2:169152840:G:T, 2:169152904:T:A, 2:169152959:C:T, 2:169154496:C:G, 2:169154496:C:T, 2:169154499:C:A, 2:169154509:T:G, 2:169154550:G:A, 2:169154575:G:T, 2:169154590:C:G, 2:169154600:C:G, 2:169154604:C:G, 2:169156289:G:A, 2:169156298:G:A, 2:169156300:C:A, 2:169156301:G:T, 2:169156318:A:T, 2:169156354:G:C, 2:169156384:A:G, 2:169156403:T:C, 2:169157370:C:T, 2:169157382:G:T, 2:169157383:T:A, 2:169157415:G:T, 2:169157433:C:G, 2:169157434:C:G, 2:169157436:C:G, 2:169157452:T:C, 2:169157469:A:G, 2:169162510:G:A, 2:169162514:C:T, 2:169162517:C:T, 2:169162538:T:C, 2:169162558:T:C, 2:169162559:T:A, 2:169162560:A:C, 2:169162561:T:C, 2:169162569:T:A, 2:169162576:C:G, 2:169162591:G:A, 2:169162594:T:C, 2:169165994:C:A, 2:169166006:C:T, 2:169168568:T:A, 2:169168583:T:A, 2:169168584:C:T, 2:169168607:G:A, 2:169168632:C:G, 2:169168661:T:C, 2:169168665:G:A, 2:169168671:G:C, 2:169169702:G:A, 2:169169747:C:T, 2:169169761:C:G, 2:169169762:T:C, 2:169169774:G:A, 2:169169780:T:C, 2:169169800:G:C, 2:169170559:C:T, 2:169170607:C:T, 2:169170619:C:T, 2:169170637:C:T, 2:169170645:G:T, 2:169170661:C:T, 2:169170662:G:A, 2:169170665:G:C, 2:169172039:C:A, 2:169172041:CCA:C, 2:169172072:G:A, 2:169172101:C:A, 2:169173108:C:T, 2:169173138:C:G, 2:169173140:T:C, 2:169173141:T:C, 2:169173176:G:A, 2:169173916:T:TA, 2:169173917:A:T, 2:169173919:T:A, 2:169173942:G:A, 2:169174000:C:T, 2:169174016:C:G, 2:169174017:T:C, 2:169174032:G:A, 2:169174046:G:C, 2:169174053:C:A, 2:169174054:T:C, 2:169174055:G:C, 2:169174099:G:A, 2:169174147:A:C, 2:169174152:C:T, 2:169175199:G:A, 2:169175223:C:T, 2:169175264:G:C, 2:169175265:T:C, 2:169175285:T:C, 2:169175292:G:C, 2:169175309:C:T, 2:169175309:C:A, 2:169175354:T:C, 2:169175376:A:C, 2:169175378:A:G, 2:169176424:C:T, 2:169176484:G:C, 2:169176489:C:G, 2:169176508:C:G, 2:169176537:A:G, 2:169176549:T:G, 2:169176552:G:A, 2:169176567:T:C, 2:169176574:C:T, 2:169177850:T:C, 2:169177968:G:C, 2:169177983:C:T, 2:169177994:G:T, 2:169178010:C:T, 2:169181458:C:A, 2:169181488:C:T, 2:169181499:T:C, 2:169181503:T:C, 2:169181509:T:C, 2:169181522:C:G, 2:169182178:G:C, 2:169182209:C:A, 2:169182220:G:T, 2:169182228:C:A, 2:169182255:G:T, 2:169182317:T:C, 2:169185527:C:T, 2:169185533:G:A, 2:169185534:C:A, 2:169185555:T:A, 2:169185572:G:A, 2:169185581:A:G, 2:169185585:A:G, 2:169185615:C:A, 2:169185626:A:C, 2:169185633:T:C, 2:169185663:C:T, 2:169185665:T:C, 2:169185677:T:C, 2:169185743:A:G, 2:169185744:T:G, 2:169185779:G:T, 2:169185813:C:A, 2:169185852:T:G, 2:169185905:C:T, 2:169185945:A:G, 2:169185947:T:C, 2:169185948:A:G, 2:169185956:G:A, 2:169185962:G:A, 2:169186002:C:T, 2:169186011:C:A, 2:169186014:T:G, 2:169187983:A:C, 2:169187983:A:T, 2:169188011:TG:T, 2:169188030:T:C, 2:169188033:C:T, 2:169188041:C:T, 2:169188047:T:C, 2:169188077:G:A, 2:169188101:T:A, 2:169188105:T:A, 2:169188200:T:C, 2:169188221:C:A, 2:169188231:C:T, 2:169188253:G:T, 2:169188257:C:T, 2:169191833:T:C, 2:169191899:T:G, 2:169191915:A:C, 2:169191917:C:T, 2:169191941:C:T, 2:169191946:T:C, 2:169191972:C:A, 2:169192007:A:G, 2:169192010:C:G, 2:169193789:C:T, 2:169193790:A:G, 2:169193811:C:T, 2:169193850:T:C, 2:169196971:G:A, 2:169196976:G:A, 2:169197010:T:C, 2:169198791:TA:T, 2:169198800:T:A, 2:169198809:C:T, 2:169198834:C:A, 2:169198840:A:G, 2:169198854:G:A, 2:169198858:T:C, 2:169198905:C:T, 2:169198909:C:T, 2:169201628:G:A, 2:169201648:G:A, 2:169201660:T:G, 2:169201719:C:T, 2:169201781:C:T, 2:169201789:T:C, 2:169201793:A:C, 2:169201805:G:T, 2:169201806:G:T, 2:169201825:C:T, 2:169202775:A:C, 2:169202788:C:G, 2:169202795:C:T, 2:169202824:G:A, 2:169202834:G:T, 2:169202836:C:T, 2:169202839:T:C, 2:169202884:A:G, 2:169202920:T:A, 2:169202928:A:T, 2:169203985:G:C, 2:169203999:C:G, 2:169204021:C:G, 2:169204030:T:A, 2:169204049:G:C, 2:169204054:T:C, 2:169204120:C:A, 2:169204132:T:C, 2:169204137:C:T, 2:169204143:A:G, 2:169204157:C:G, 2:169204175:A:T, 2:169204189:G:A, 2:169204225:T:C, 2:169204229:T:G, 2:169204258:G:A, 2:169205492:C:T, 2:169205539:A:C, 2:169205570:G:A, 2:169205574:G:T, 2:169205590:G:A, 2:169205606:C:T, 2:169206047:G:C, 2:169206048:C:T, 2:169206089:C:T, 2:169206101:A:C, 2:169206111:T:G, 2:169206129:C:T, 2:169206143:C:T, 2:169206350:G:C, 2:169206368:AG:A, 2:169206380:G:A, 2:169206389:C:G, 2:169206403:T:G, 2:169206413:G:A, 2:169206414:T:C, 2:169206476:A:G, 2:169206493:G:T, 2:169206543:C:T, 2:169206563:G:T, 2:169206564:T:G, 2:169206589:A:T, 2:169206599:G:T, 2:169206624:G:T, 2:169206639:G:T, 2:169206687:G:A, 2:169206689:T:C, 2:169206691:G:T, 2:169206694:G:T, 2:169206699:C:A, 2:169206734:A:G, 2:169206765:T:C, 2:169206772:T:C, 2:169206782:G:T, 2:169206825:T:G, 2:169206911:A:C, 2:169206935:C:G, 2:169206936:G:C, 2:169206969:C:T, 2:169206978:C:T, 2:169207007:C:T, 2:169207023:T:A, 2:169207038:G:A, 2:169207049:T:C, 2:169207052:G:A, 2:169207056:A:T, 2:169207056:A:G, 2:169207059:C:A, 2:169207071:G:A, 2:169207074:C:T, 2:169207149:T:C, 2:169207155:C:T, 2:169207179:G:A, 2:169207181:T:G, 2:169207185:T:G, 2:169207194:T:C, 2:169209453:C:G, 2:169209490:T:A, 2:169209490:T:G, 2:169209566:G:A, 2:169209583:A:C, 2:169209639:G:A, 2:169211969:T:G, 2:169212012:T:A, 2:169212022:A:C, 2:169212028:T:C, 2:169212039:A:G, 2:169212066:T:C, 2:169212078:G:A, 2:169212179:G:C, 2:169212195:G:A, 2:169212199:C:T, 2:169213713:A:G, 2:169213732:C:G, 2:169213738:C:T, 2:169213747:C:G, 2:169213756:C:T, 2:169213763:T:A, 2:169213770:G:A, 2:169213794:A:G, 2:169213819:G:T, 2:169213830:A:C, 2:169213834:T:C, 2:169213835:C:T, 2:169216254:A:T, 2:169216260:C:T, 2:169216266:G:A, 2:169216272:G:T, 2:169216287:T:C, 2:169216297:T:C, 2:169216305:G:T, 2:169216328:G:T, 2:169216342:G:C, 2:169216377:G:A, 2:169216390:G:T, 2:169216398:C:T, 2:169216399:T:C, 2:169216431:C:G, 2:169220457:C:T, 2:169220458:G:A, 2:169220465:A:T, 2:169220472:G:C, 2:169220481:A:T, 2:169220493:A:G, 2:169220497:C:T, 2:169220502:G:C, 2:169220506:T:C, 2:169220521:T:C, 2:169220526:G:A, 2:169225360:A:G, 2:169225389:A:G, 2:169225392:A:G, 2:169225397:T:C, 2:169225404:G:A, 2:169225419:T:C, 2:169225452:C:T, 2:169226432:A:C, 2:169226442:T:C, 2:169226453:G:A, 2:169226469:C:T, 2:169226480:T:C, 2:169226489:C:T, 2:169226499:G:T, 2:169226501:A:C, 2:169226511:C:T, 2:169226513:T:C, 2:169226516:C:T, 2:169226565:C:T, 2:169226579:G:T, 2:169226580:G:T, 2:169226581:T:A, 2:169231717:T:C, 2:169231740:G:A, 2:169231752:C:T, 2:169231759:G:A, 2:169231783:G:A, 2:169231785:C:T, 2:169231786:C:G, 2:169231789:G:C, 2:169231821:G:A, 2:169231828:C:G, 2:169233437:G:T, 2:169233441:C:T, 2:169233464:T:G, 2:169233509:C:T, 2:169233510:G:A, 2:169233522:G:A, 2:169233548:G:C, 2:169233582:G:C, 2:169235891:G:C, 2:169235916:A:C, 2:169235917:T:C, 2:169235926:G:A, 2:169235967:A:G, 2:169235978:C:A, 2:169235978:C:G, 2:169235994:C:A, 2:169236005:G:T, 2:169236015:G:A, 2:169236022:C:T, 2:169236027:C:A, 2:169236028:G:A, 2:169236028:G:C, 2:169236048:G:T, 2:169236053:GA:G, 2:169236054:A:T, 2:169237121:G:A, 2:169237131:T:C, 2:169237140:T:A, 2:169237149:T:C, 2:169237170:G:T, 2:169237196:A:G, 2:169237206:G:C, 2:169237239:C:T, 2:169237254:T:C, 2:169237265:A:C, 2:169238101:T:C, 2:169238102:C:G, 2:169238104:G:T, 2:169238162:G:A, 2:169238167:C:T, 2:169238221:T:C, 2:169238227:T:C, 2:169238267:T:A, 2:169238271:A:C, 2:169238293:C:G, 2:169239532:A:G, 2:169239542:T:A, 2:169239544:C:G, 2:169239554:T:G, 2:169239574:T:C, 2:169239601:A:G, 2:169239648:T:C, 2:169239718:G:A, 2:169240978:G:A, 2:169241020:C:T, 2:169241116:G:A, 2:169241159:G:A, 2:169241171:A:G, 2:169241177:T:A, 2:169241192:C:T, 2:169241239:G:T, 2:169241285:A:G, 2:169241299:G:A, 2:169242955:C:T, 2:169242976:T:C, 2:169242983:T:G, 2:169242997:C:G, 2:169243006:C:T, 2:169243021:A:G, 2:169243022:T:C, 2:169243025:A:G, 2:169243030:T:A, 2:169243054:G:A, 2:169243057:G:A, 2:169243068:T:G, 2:169243421:A:T, 2:169243431:A:C, 2:169243455:A:C, 2:169243468:A:G, 2:169243486:C:T, 2:169243502:G:C, 2:169243513:T:C, 2:169244702:T:G, 2:169244782:T:G, 2:169244810:C:G, 2:169244819:G:A, 2:169244821:C:A, 2:169244833:T:C, 2:169244843:C:T, 2:169244860:T:C, 2:169244873:A:G, 2:169244899:C:T, 2:169244921:A:G, 2:169246738:C:G, 2:169246785:C:A, 2:169246800:G:A, 2:169246800:G:C, 2:169246831:G:A, 2:169246843:T:C, 2:169246875:G:A, 2:169246942:T:C, 2:169246978:C:A, 2:169247378:C:T, 2:169247384:G:T, 2:169247408:A:T, 2:169247417:T:C, 2:169256142:G:C, 2:169256147:A:G, 2:169256184:T:C, 2:169256197:T:G, 2:169256235:C:T, 2:169257123:C:T, 2:169257127:C:G, 2:169257134:T:C, 2:169257145:T:C, 2:169257161:T:A, 2:169257207:C:T, 2:169257215:T:C, 2:169259026:C:T, 2:169259028:G:A, 2:169259031:A:G, 2:169259049:G:A, 2:169259052:C:A, 2:169259053:G:C, 2:169259067:T:C, 2:169259074:C:T, 2:169259076:A:T, 2:169259079:G:A, 2:169259085:C:G, 2:169259086:T:C, 2:169259102:C:A, 2:169259106:A:C, 2:169259112:C:G, 2:169259112:C:T, 2:169259193:C:T, 2:169259194:T:C, 2:169270925:T:TA, 2:169270928:A:G, 2:169270963:G:C, 2:169270966:C:G, 2:169270966:C:T, 2:169271011:C:G, 2:169271075:C:G, 2:169271098:T:C, 2:169272963:C:T, 2:169272968:G:A, 2:169272969:T:C, 2:169273016:A:G, 2:169273038:C:T, 2:169273044:T:C, 2:169273050:C:T, 2:169273065:T:C, 2:169273067:G:A, 2:169275053:G:A, 2:169275090:C:T, 2:169275099:A:G, 2:169275154:C:A, 2:169275224:T:A, 2:169275228:CTACAGTCT:C, 2:169275239:CTGT:C, 2:169277758:C:T, 2:169277817:A:G, 2:169277848:C:T, 2:169277864:C:A, 2:169277893:A:G, 2:169277905:G:C, 2:169277911:G:A, 2:169277930:C:A, 2:169279376:C:G, 2:169279379:T:C, 2:169279402:G:A, 2:169279420:G:A, 2:169279441:C:T, 2:169279448:C:A, 2:169279478:T:C, 2:169279519:G:T, 2:169279540:A:G, 2:169279556:C:A, 2:169279579:A:C, 2:169279592:A:G, 2:169280379:C:T, 2:169280406:C:T, 2:169280471:C:G, 2:169280487:G:A, 2:169280492:T:C, 2:169280504:A:C, 2:169280514:C:T, 2:169282903:G:A, 2:169282917:C:T, 2:169282942:G:A, 2:169282953:C:T, 2:169282953:C:A, 2:169282968:T:C, 2:169282978:C:T, 2:169283001:T:A, 2:169289038:G:A, 2:169289047:T:C, 2:169289050:G:A, 2:169289065:C:A, 2:169289088:C:G, 2:169289104:G:A, 2:169289112:T:C, 2:169289121:T:A, 2:169289143:T:C, 2:169290865:G:A, 2:169290866:T:C, 2:169290868:T:G, 2:169290878:C:T, 2:169290902:T:C, 2:169290923:T:C, 2:169290929:T:C, 2:169290961:C:G, 2:169290964:G:A, 2:169290971:A:G, 2:169290993:G:T, 2:169292251:AC:A, 2:169292312:T:C, 2:169292334:G:C, 2:169292354:C:T, 2:169292361:T:C, 2:169294169:C:T, 2:169294208:G:A, 2:169294208:G:C, 2:169294232:A:G, 2:169294247:G:C, 2:169294254:T:C, 2:169294598:A:T, 2:169294626:C:G, 2:169294636:C:T, 2:169294659:G:C, 2:169294660:T:C, 2:169294686:G:T, 2:169294690:G:A, 2:169294697:A:C, 2:169294701:G:T, 2:169294704:G:A, 2:169294708:ACT:A, 2:169294709:C:A, 2:169307280:C:T, 2:169307326:C:T, 2:169307350:A:G, 2:169307358:T:C, 2:169307371:T:A, 2:169307386:AT:A, 2:169307397:G:A, 2:169307398:C:T, 2:169307399:T:C, 2:169318774:G:A, 2:169318774:G:T, 2:169318853:C:G, 2:169318863:C:T, 2:169318881:A:T, 2:169320777:C:T, 2:169320785:A:G, 2:169320787:T:G, 2:169320831:A:G, 2:169320840:G:T, 2:169320846:A:G, 2:169320884:T:A, 2:169362321:C:G, 2:169362374:GC:G, 2:169362390:C:T, 2:169362392:C:T, 2:169128692:T:C, 2:169128741:G:GTCTC, 2:169128784:G:A, 2:169128819:C:G, 2:169128823:T:A, 2:169129017:G:A, 2:169129027:G:T, 2:169129048:G:T, 2:169129051:T:C, 2:169129059:C:T, 2:169129060:G:A, 2:169129070:A:T, 2:169129075:A:G, 2:169132638:G:T, 2:169132638:G:A, 2:169132641:C:T, 2:169132647:T:C, 2:169132648:A:G, 2:169132661:CA:C, 2:169132664:AT:A, 2:169137405:AC:A, 2:169137457:T:C, 2:169137482:A:T, 2:169137489:T:A, 2:169138583:C:T, 2:169138587:G:A, 2:169138590:C:A, 2:169138611:C:A, 2:169138635:A:G, 2:169138639:T:C, 2:169138655:T:A, 2:169138687:G:A, 2:169139250:C:T, 2:169139273:G:A, 2:169139296:T:C, 2:169139369:C:T, 2:169139545:G:T, 2:169139552:G:A, 2:169139572:G:A, 2:169140464:G:A, 2:169140500:T:C, 2:169140509:C:T, 2:169140514:TG:T, 2:169140516:G:A, 2:169145797:G:C, 2:169145840:T:A, 2:169145889:G:T, 2:169145907:G:C, 2:169145924:C:T, 2:169146779:T:C, 2:169146801:T:G, 2:169146883:G:C, 2:169146908:C:A, 2:169146941:G:T, 2:169146947:C:G, 2:169146955:T:A, 2:169150901:A:T, 2:169150933:G:C, 2:169150965:A:G, 2:169150994:C:A, 2:169150994:C:T, 2:169151007:C:T, 2:169151012:G:A, 2:169151022:T:C, 2:169152821:T:C, 2:169152827:C:T, 2:169152839:C:G, 2:169152840:G:T, 2:169152904:T:A, 2:169152959:C:T, 2:169154499:C:A, 2:169154509:T:G, 2:169154550:G:A, 2:169154575:G:T, 2:169154590:C:G, 2:169154604:C:G, 2:169156289:G:A, 2:169156318:A:T, 2:169156354:G:C, 2:169156384:A:G, 2:169156403:T:C, 2:169157370:C:T, 2:169157383:T:A, 2:169157433:C:G, 2:169157434:C:G, 2:169157436:C:G, 2:169157452:T:C, 2:169157469:A:G, 2:169162514:C:T, 2:169162517:C:T, 2:169162538:T:C, 2:169162558:T:C, 2:169162559:T:A, 2:169162560:A:C, 2:169162561:T:C, 2:169162576:C:G, 2:169162591:G:A, 2:169166006:C:T, 2:169168568:T:A, 2:169168583:T:A, 2:169168584:C:T, 2:169168607:G:A, 2:169168632:C:G, 2:169168661:T:C, 2:169168665:G:A, 2:169168671:G:C, 2:169169702:G:A, 2:169169747:C:T, 2:169169774:G:A, 2:169169780:T:C, 2:169169800:G:C, 2:169170559:C:T, 2:169170607:C:T, 2:169170619:C:T, 2:169170637:C:T, 2:169170645:G:T, 2:169170661:C:T, 2:169170662:G:A, 2:169170665:G:C, 2:169172039:C:A, 2:169172041:CCA:C, 2:169172072:G:A, 2:169172101:C:A, 2:169173108:C:T, 2:169173138:C:G, 2:169173140:T:C, 2:169173141:T:C, 2:169173176:G:A, 2:169173916:T:TA, 2:169173917:A:T, 2:169173919:T:A, 2:169173942:G:A, 2:169174000:C:T, 2:169174016:C:G, 2:169174017:T:C, 2:169174032:G:A, 2:169174046:G:C, 2:169174053:C:A, 2:169174054:T:C, 2:169174055:G:C, 2:169174099:G:A, 2:169174152:C:T, 2:169175199:G:A, 2:169175223:C:T, 2:169175264:G:C, 2:169175265:T:C, 2:169175285:T:C, 2:169175292:G:C, 2:169175309:C:T, 2:169175309:C:A, 2:169175376:A:C, 2:169175378:A:G, 2:169176424:C:T, 2:169176508:C:G, 2:169176537:A:G, 2:169176549:T:G, 2:169176552:G:A, 2:169176567:T:C, 2:169176574:C:T, 2:169177850:T:C, 2:169177968:G:C, 2:169177983:C:T, 2:169177994:G:T, 2:169178010:C:T, 2:169181458:C:A, 2:169181488:C:T, 2:169181499:T:C, 2:169181503:T:C, 2:169181509:T:C, 2:169181522:C:G, 2:169182178:G:C, 2:169182209:C:A, 2:169182220:G:T, 2:169182228:C:A, 2:169182255:G:T, 2:169182317:T:C, 2:169185527:C:T, 2:169185555:T:A, 2:169185572:G:A, 2:169185581:A:G, 2:169185585:A:G, 2:169185615:C:A, 2:169185626:A:C, 2:169185633:T:C, 2:169185663:C:T, 2:169185665:T:C, 2:169185677:T:C, 2:169185743:A:G, 2:169185744:T:G, 2:169185779:G:T, 2:169185813:C:A, 2:169185852:T:G, 2:169185905:C:T, 2:169185945:A:G, 2:169185947:T:C, 2:169185948:A:G, 2:169185956:G:A, 2:169185962:G:A, 2:169186002:C:T, 2:169186011:C:A, 2:169186014:T:G, 2:169187983:A:C, 2:169187983:A:T, 2:169188011:TG:T, 2:169188030:T:C, 2:169188033:C:T, 2:169188047:T:C, 2:169188077:G:A, 2:169188101:T:A, 2:169188221:C:A, 2:169188231:C:T, 2:169188257:C:T, 2:169191833:T:C, 2:169191899:T:G, 2:169191915:A:C, 2:169191917:C:T, 2:169191941:C:T, 2:169191946:T:C, 2:169191972:C:A, 2:169192007:A:G, 2:169192010:C:G, 2:169193789:C:T, 2:169193790:A:G, 2:169193811:C:T, 2:169193850:T:C, 2:169196976:G:A, 2:169197010:T:C, 2:169198791:TA:T, 2:169198800:T:A, 2:169198809:C:T, 2:169198834:C:A, 2:169198840:A:G, 2:169198854:G:A, 2:169198858:T:C, 2:169198905:C:T, 2:169198909:C:T, 2:169201628:G:A, 2:169201648:G:A, 2:169201660:T:G, 2:169201719:C:T, 2:169201781:C:T, 2:169201789:T:C, 2:169201793:A:C, 2:169201805:G:T, 2:169201806:G:T, 2:169201825:C:T, 2:169202775:A:C, 2:169202788:C:G, 2:169202795:C:T, 2:169202834:G:T, 2:169202836:C:T, 2:169202839:T:C, 2:169202920:T:A, 2:169203985:G:C, 2:169203999:C:G, 2:169204030:T:A, 2:169204054:T:C, 2:169204120:C:A, 2:169204132:T:C, 2:169204137:C:T, 2:169204143:A:G, 2:169204175:A:T, 2:169204189:G:A, 2:169204229:T:G, 2:169204258:G:A, 2:169205492:C:T, 2:169205539:A:C, 2:169205570:G:A, 2:169205574:G:T, 2:169205590:G:A, 2:169205606:C:T, 2:169206047:G:C, 2:169206048:C:T, 2:169206089:C:T, 2:169206101:A:C, 2:169206111:T:G, 2:169206129:C:T, 2:169206143:C:T, 2:169206368:AG:A, 2:169206380:G:A, 2:169206389:C:G, 2:169206413:G:A, 2:169206414:T:C, 2:169206476:A:G, 2:169206493:G:T, 2:169206543:C:T, 2:169206564:T:G, 2:169206624:G:T, 2:169206639:G:T, 2:169206687:G:A, 2:169206689:T:C, 2:169206691:G:T, 2:169206694:G:T, 2:169206699:C:A, 2:169206734:A:G, 2:169206765:T:C, 2:169206772:T:C, 2:169206782:G:T, 2:169206825:T:G, 2:169206911:A:C, 2:169206969:C:T, 2:169207007:C:T, 2:169207023:T:A, 2:169207038:G:A, 2:169207049:T:C, 2:169207052:G:A, 2:169207056:A:G, 2:169207056:A:T, 2:169207059:C:A, 2:169207071:G:A, 2:169207074:C:T, 2:169207149:T:C, 2:169207155:C:T, 2:169207179:G:A, 2:169207181:T:G, 2:169207185:T:G, 2:169207194:T:C, 2:169209453:C:G, 2:169209583:A:C, 2:169209639:G:A, 2:169211969:T:G, 2:169212012:T:A, 2:169212022:A:C, 2:169212028:T:C, 2:169212039:A:G, 2:169212066:T:C, 2:169212078:G:A, 2:169212179:G:C, 2:169212195:G:A, 2:169212199:C:T, 2:169213713:A:G, 2:169213732:C:G, 2:169213738:C:T, 2:169213747:C:G, 2:169213756:C:T, 2:169213763:T:A, 2:169213794:A:G, 2:169213819:G:T, 2:169213830:A:C, 2:169216254:A:T, 2:169216260:C:T, 2:169216266:G:A, 2:169216272:G:T, 2:169216287:T:C, 2:169216297:T:C, 2:169216305:G:T, 2:169216328:G:T, 2:169216342:G:C, 2:169216377:G:A, 2:169216390:G:T, 2:169216398:C:T, 2:169216399:T:C, 2:169216431:C:G, 2:169220457:C:T, 2:169220458:G:A, 2:169220465:A:T, 2:169220472:G:C, 2:169220481:A:T, 2:169220497:C:T, 2:169220506:T:C, 2:169220521:T:C, 2:169220526:G:A, 2:169225360:A:G, 2:169225392:A:G, 2:169225404:G:A, 2:169225419:T:C, 2:169225452:C:T, 2:169226432:A:C, 2:169226442:T:C, 2:169226469:C:T, 2:169226480:T:C, 2:169226489:C:T, 2:169226499:G:T, 2:169226501:A:C, 2:169226511:C:T, 2:169226513:T:C, 2:169226516:C:T, 2:169226565:C:T, 2:169226579:G:T, 2:169226580:G:T, 2:169231717:T:C, 2:169231752:C:T, 2:169231759:G:A, 2:169231783:G:A, 2:169231785:C:T, 2:169231786:C:G, 2:169231821:G:A, 2:169231828:C:G, 2:169233437:G:T, 2:169233441:C:T, 2:169233464:T:G, 2:169233509:C:T, 2:169233510:G:A, 2:169233522:G:A, 2:169233548:G:C, 2:169233582:G:C, 2:169235891:G:C, 2:169235916:A:C, 2:169235926:G:A, 2:169235967:A:G, 2:169235978:C:A, 2:169235978:C:G, 2:169235994:C:A, 2:169236005:G:T, 2:169236015:G:A, 2:169236022:C:T, 2:169236027:C:A, 2:169236028:G:A, 2:169236028:G:C, 2:169236048:G:T, 2:169236053:GA:G, 2:169236054:A:T, 2:169237121:G:A, 2:169237131:T:C, 2:169237140:T:A, 2:169237170:G:T, 2:169237196:A:G, 2:169237206:G:C, 2:169237239:C:T, 2:169237254:T:C, 2:169237265:A:C, 2:169238101:T:C, 2:169238102:C:G, 2:169238104:G:T, 2:169238162:G:A, 2:169238167:C:T, 2:169238221:T:C, 2:169238267:T:A, 2:169238271:A:C, 2:169239532:A:G, 2:169239542:T:A, 2:169239544:C:G, 2:169239554:T:G, 2:169239574:T:C, 2:169239648:T:C, 2:169239718:G:A, 2:169240978:G:A, 2:169241020:C:T, 2:169241116:G:A, 2:169241159:G:A, 2:169241171:A:G, 2:169241177:T:A, 2:169241192:C:T, 2:169241239:G:T, 2:169241285:A:G, 2:169241299:G:A, 2:169242955:C:T, 2:169242976:T:C, 2:169242997:C:G, 2:169243021:A:G, 2:169243022:T:C, 2:169243025:A:G, 2:169243030:T:A, 2:169243057:G:A, 2:169243068:T:G, 2:169243421:A:T, 2:169243431:A:C, 2:169243455:A:C, 2:169243468:A:G, 2:169243486:C:T, 2:169243502:G:C, 2:169244702:T:G, 2:169244782:T:G, 2:169244819:G:A, 2:169244821:C:A, 2:169244833:T:C, 2:169244843:C:T, 2:169244873:A:G, 2:169244921:A:G, 2:169246738:C:G, 2:169246785:C:A, 2:169246800:G:A, 2:169246800:G:C, 2:169246831:G:A, 2:169246942:T:C, 2:169246978:C:A, 2:169247378:C:T, 2:169247384:G:T, 2:169247408:A:T, 2:169256142:G:C, 2:169256147:A:G, 2:169256184:T:C, 2:169256197:T:G, 2:169256235:C:T, 2:169257123:C:T, 2:169257127:C:G, 2:169257134:T:C, 2:169257145:T:C, 2:169257161:T:A, 2:169257207:C:T, 2:169257215:T:C, 2:169259026:C:T, 2:169259049:G:A, 2:169259052:C:A, 2:169259053:G:C, 2:169259067:T:C, 2:169259076:A:T, 2:169259079:G:A, 2:169259085:C:G, 2:169259086:T:C, 2:169259102:C:A, 2:169259106:A:C, 2:169259112:C:G, 2:169259112:C:T, 2:169259193:C:T, 2:169259194:T:C, 2:169270925:T:TA, 2:169270928:A:G, 2:169271011:C:G, 2:169272963:C:T, 2:169273016:A:G, 2:169273038:C:T, 2:169273044:T:C, 2:169275053:G:A, 2:169275099:A:G, 2:169275154:C:A, 2:169275224:T:A, 2:169275228:CTACAGTCT:C, 2:169275239:CTGT:C, 2:169277758:C:T, 2:169277848:C:T, 2:169277864:C:A, 2:169277893:A:G, 2:169277905:G:C, 2:169277911:G:A, 2:169277930:C:A, 2:169279376:C:G, 2:169279379:T:C, 2:169279402:G:A, 2:169279420:G:A, 2:169279448:C:A, 2:169279478:T:C, 2:169279519:G:T, 2:169279540:A:G, 2:169279556:C:A, 2:169279579:A:C, 2:169279592:A:G, 2:169280379:C:T, 2:169280406:C:T, 2:169280471:C:G, 2:169280487:G:A, 2:169280492:T:C, 2:169280504:A:C, 2:169280514:C:T, 2:169282903:G:A, 2:169282917:C:T, 2:169282942:G:A, 2:169282953:C:A, 2:169282968:T:C, 2:169282978:C:T, 2:169283001:T:A, 2:169289038:G:A, 2:169289047:T:C, 2:169289050:G:A, 2:169289065:C:A, 2:169289088:C:G, 2:169289104:G:A, 2:169289112:T:C, 2:169289121:T:A, 2:169290868:T:G, 2:169290878:C:T, 2:169290929:T:C, 2:169290961:C:G, 2:169290964:G:A, 2:169290971:A:G, 2:169290993:G:T, 2:169292251:AC:A, 2:169292312:T:C, 2:169292334:G:C, 2:169292361:T:C, 2:169294169:C:T, 2:169294208:G:A, 2:169294232:A:G, 2:169294598:A:T, 2:169294626:C:G, 2:169294686:G:T, 2:169294690:G:A, 2:169294697:A:C, 2:169294704:G:A, 2:169294708:ACT:A, 2:169307280:C:T, 2:169307326:C:T, 2:169307350:A:G, 2:169307386:AT:A, 2:169307397:G:A, 2:169307398:C:T, 2:169307399:T:C, 2:169318774:G:T, 2:169318774:G:A, 2:169320777:C:T, 2:169320787:T:G, 2:169320831:A:G, 2:169320840:G:T, 2:169320846:A:G, 2:169320884:T:A, 2:169362321:C:G, 2:169362374:GC:G, 2:169362392:C:T, 2:169128674:A:C, 2:169128677:C:T, 2:169128686:C:T, 2:169128691:T:C, 2:169128692:T:A, 2:169128694:G:A, 2:169128697:G:A, 2:169128700:T:G, 2:169128709:G:C, 2:169128719:T:C, 2:169128727:T:C, 2:169128737:T:G, 2:169128743:C:G, 2:169128743:C:T, 2:169128751:G:T, 2:169128757:G:A, 2:169128760:T:C, 2:169128764:G:T, 2:169128767:T:G, 2:169128778:G:T, 2:169128785:A:C, 2:169128791:G:A, 2:169128797:T:G, 2:169128802:G:A, 2:169128807:A:T, 2:169128808:C:T, 2:169128808:C:A, 2:169128812:C:T, 2:169128820:T:C, 2:169128821:C:T, 2:169128829:A:G, 2:169128829:A:T, 2:169129011:A:T, 2:169129012:C:T, 2:169129015:G:T, 2:169129022:G:C, 2:169129023:A:G, 2:169129026:G:A, 2:169129033:C:A, 2:169129056:T:A, 2:169129073:C:A, 2:169129080:G:A, 2:169129085:C:T, 2:169132578:G:T, 2:169132581:C:T, 2:169132591:C:T, 2:169132599:G:C, 2:169132599:G:A, 2:169132602:G:C, 2:169132609:T:C, 2:169132615:G:T, 2:169132617:A:T, 2:169132618:C:A, 2:169132630:G:T, 2:169132639:G:A, 2:169132653:T:C, 2:169132655:AT:A, 2:169132657:T:A, 2:169132663:C:T, 2:169132667:T:A, 2:169132678:T:A, 2:169137396:A:T, 2:169137399:G:A, 2:169137399:G:C, 2:169137403:G:A, 2:169137406:C:G, 2:169137406:C:T, 2:169137411:T:C, 2:169137415:C:T, 2:169137420:C:T, 2:169137421:T:C, 2:169137424:C:A, 2:169137432:G:A, 2:169137439:T:C, 2:169137442:G:A, 2:169137450:A:T, 2:169137453:A:T, 2:169137459:G:T, 2:169137463:G:C, 2:169137469:C:A, 2:169137469:C:T, 2:169137475:C:T, 2:169137476:C:T, 2:169137478:T:C, 2:169137481:C:T, 2:169137487:C:T, 2:169137489:T:C, 2:169137493:T:A, 2:169138576:C:T, 2:169138582:C:T, 2:169138582:C:G, 2:169138584:A:G, 2:169138624:C:G, 2:169138624:C:T, 2:169138630:T:C, 2:169138653:G:A, 2:169138660:A:C, 2:169138665:A:G, 2:169138666:C:A, 2:169138681:C:T, 2:169138688:C:G, 2:169138693:C:A, 2:169138696:G:C, 2:169138698:C:T, 2:169138701:C:G, 2:169138702:T:C, 2:169138705:A:T, 2:169139249:A:T, 2:169139251:C:T, 2:169139255:G:A, 2:169139260:T:C, 2:169139263:G:A, 2:169139269:G:A, 2:169139281:G:A, 2:169139285:C:T, 2:169139290:C:G, 2:169139299:T:C, 2:169139314:A:G, 2:169139317:G:A, 2:169139318:C:A, 2:169139326:C:G, 2:169139327:C:T, 2:169139329:A:G, 2:169139330:T:C, 2:169139332:A:T, 2:169139371:G:C, 2:169139538:CTTACTTG:C, 2:169139543:T:C, 2:169139548:C:T, 2:169139573:C:T, 2:169139574:C:T, 2:169139587:T:A, 2:169139591:C:T, 2:169139594:T:C, 2:169139594:T:A, 2:169139597:A:T, 2:169139609:A:G, 2:169140456:T:C, 2:169140461:T:G, 2:169140461:T:C, 2:169140468:G:C, 2:169140473:G:T, 2:169140474:T:G, 2:169140475:C:A, 2:169140476:T:C, 2:169140479:T:A, 2:169140485:T:C, 2:169140489:A:T, 2:169140499:G:T, 2:169140503:A:T, 2:169140503:A:C, 2:169140513:A:AT, 2:169140513:A:T, 2:169140515:G:T, 2:169140516:G:T, 2:169140519:G:A, 2:169140521:G:C, 2:169140521:G:T, 2:169140522:G:A, 2:169140525:G:C, 2:169140526:G:T, 2:169140527:T:C, 2:169140533:G:A, 2:169140539:T:C, 2:169140540:C:T, 2:169140545:G:C, 2:169142679:T:A, 2:169142683:A:C, 2:169142685:T:C, 2:169142691:G:T, 2:169142703:A:G, 2:169142710:T:C, 2:169142715:C:T, 2:169142727:G:T, 2:169142729:A:T, 2:169142735:G:T, 2:169142743:C:T, 2:169142757:CAG:C, 2:169142772:A:T, 2:169142773:T:C, 2:169142778:T:C, 2:169142779:T:C, 2:169142781:C:T, 2:169142784:A:C, 2:169142784:AG:A, 2:169142785:G:A, 2:169142785:G:T, 2:169142786:G:T, 2:169142787:T:C, 2:169142790:G:A, 2:169142793:A:G, 2:169145755:T:A, 2:169145758:T:C, 2:169145759:A:G, 2:169145760:T:G, 2:169145779:C:T, 2:169145780:G:A, 2:169145786:G:C, 2:169145812:G:T, 2:169145829:T:A, 2:169145851:C:T, 2:169145855:C:T, 2:169145861:C:T, 2:169145863:T:G, 2:169145872:G:T, 2:169145875:A:G, 2:169145876:T:C, 2:169145888:G:T, 2:169145890:T:C, 2:169145908:C:T, 2:169145914:G:C, 2:169145915:G:T, 2:169145916:G:T, 2:169145918:T:C, 2:169146737:A:C, 2:169146739:C:T, 2:169146741:T:A, 2:169146741:T:C, 2:169146742:C:T, 2:169146745:T:G, 2:169146750:A:G, 2:169146751:T:C, 2:169146754:C:G, 2:169146774:T:C, 2:169146777:T:G, 2:169146790:T:C, 2:169146796:C:T, 2:169146808:C:T, 2:169146819:A:G, 2:169146819:A:C, 2:169146822:C:T, 2:169146823:G:A, 2:169146838:A:G, 2:169146843:A:G, 2:169146852:C:G, 2:169146855:G:A, 2:169146869:G:C, 2:169146871:C:T, 2:169146885:A:G, 2:169146891:C:A, 2:169146891:C:T, 2:169146892:G:T, 2:169146892:G:A, 2:169146897:T:C, 2:169146905:C:T, 2:169146915:G:A, 2:169146919:C:G, 2:169146937:C:G, 2:169146938:C:G, 2:169146945:G:A, 2:169146952:A:T, 2:169150898:C:G, 2:169150920:T:C, 2:169150923:C:T, 2:169150925:G:A, 2:169150937:A:G, 2:169150941:C:T, 2:169150967:C:T, 2:169150976:A:G, 2:169150977:G:C, 2:169150982:G:A, 2:169150983:C:A, 2:169150986:C:A, 2:169150986:C:G, 2:169150988:T:G, 2:169151004:T:C, 2:169152798:C:A, 2:169152800:T:C, 2:169152805:A:G, 2:169152835:A:G, 2:169152835:A:C, 2:169152838:A:G, 2:169152839:C:A, 2:169152845:T:G, 2:169152855:G:T, 2:169152869:C:T, 2:169152901:A:T, 2:169152902:T:C, 2:169152917:T:G, 2:169152923:C:A, 2:169152927:C:A, 2:169152937:T:G, 2:169152944:G:A, 2:169154466:C:T, 2:169154487:C:A, 2:169154501:T:C, 2:169154511:C:G, 2:169154511:C:CAA, 2:169154512:C:G, 2:169154513:TC:T, 2:169154514:C:T, 2:169154516:T:A, 2:169154517:C:G, 2:169154529:C:G, 2:169154533:GA:G, 2:169154534:A:T, 2:169154536:C:A, 2:169154550:G:C, 2:169154562:G:A, 2:169154565:T:A, 2:169154568:G:A, 2:169154572:A:C, 2:169154592:A:C, 2:169154601:T:G, 2:169154603:C:T, 2:169156277:C:G, 2:169156279:G:A, 2:169156288:C:T, 2:169156295:C:A, 2:169156301:G:A, 2:169156315:G:T, 2:169156315:G:A, 2:169156325:C:G, 2:169156325:C:A, 2:169156331:A:T, 2:169156334:C:G, 2:169156351:T:C, 2:169156354:G:T, 2:169156359:T:A, 2:169156372:G:C, 2:169156384:A:T, 2:169156395:T:G, 2:169156396:T:A, 2:169156402:A:G, 2:169156405:T:C, 2:169157376:C:T, 2:169157379:G:C, 2:169157380:A:T, 2:169157385:C:A, 2:169157404:C:T, 2:169157415:G:A, 2:169157416:T:C, 2:169157424:C:G, 2:169157426:GATAA:G, 2:169157431:A:T, 2:169157433:C:T, 2:169157434:C:CGTGG, 2:169157437:C:T, 2:169157449:G:T, 2:169157461:G:C, 2:169157464:C:G, 2:169157464:C:T, 2:169157465:G:C, 2:169157482:A:G, 2:169157487:C:G, 2:169157491:C:A, 2:169157496:C:T, 2:169157502:T:C, 2:169162480:A:T, 2:169162487:C:T, 2:169162508:C:A, 2:169162516:T:A, 2:169162522:A:T, 2:169162532:G:A, 2:169162538:T:G, 2:169162550:T:A, 2:169162552:C:A, 2:169162552:C:T, 2:169162562:A:G, 2:169162570:T:A, 2:169162573:G:A, 2:169162588:G:T, 2:169162589:T:C, 2:169162589:T:A, 2:169162592:G:A, 2:169162592:GT:G, 2:169165935:G:A, 2:169165938:C:T, 2:169165947:C:T, 2:169165952:G:T, 2:169165953:T:G, 2:169165956:C:T, 2:169165958:T:C, 2:169165961:C:T, 2:169165964:C:T, 2:169165965:A:C, 2:169165968:C:T, 2:169165977:C:A, 2:169165988:T:C, 2:169165990:A:C, 2:169165993:A:T, 2:169165994:C:G, 2:169165995:T:C, 2:169165997:T:C, 2:169166001:T:G, 2:169166001:T:C, 2:169166003:CA:C, 2:169166006:C:A, 2:169166007:G:T, 2:169166010:T:C, 2:169166012:T:C, 2:169166024:A:T, 2:169166028:G:T, 2:169166028:G:A, 2:169166040:T:C, 2:169166045:G:A, 2:169168546:G:C, 2:169168547:T:C, 2:169168572:C:T, 2:169168605:G:T, 2:169168610:A:C, 2:169168611:T:C, 2:169168619:T:C, 2:169168621:G:T, 2:169168626:T:G, 2:169168629:A:T, 2:169168633:GA:G, 2:169168652:T:C, 2:169168662:C:G, 2:169168671:G:T, 2:169168673:G:A, 2:169168674:T:G, 2:169169701:C:T, 2:169169701:C:G, 2:169169711:C:T, 2:169169726:CCAAA:C, 2:169169728:A:G, 2:169169732:A:G, 2:169169741:A:G, 2:169169760:AC:A, 2:169169761:C:T, 2:169169780:T:G, 2:169169782:G:T, 2:169169782:G:A, 2:169169794:T:C, 2:169169801:G:A, 2:169169809:G:A, 2:169169812:C:T, 2:169169816:T:C, 2:169170552:A:C, 2:169170553:C:T, 2:169170556:T:C, 2:169170559:C:A, 2:169170568:G:A, 2:169170574:T:C, 2:169170583:T:A, 2:169170584:C:T, 2:169170585:G:T, 2:169170617:T:G, 2:169170624:C:A, 2:169170628:T:C, 2:169170631:A:C, 2:169170646:C:T, 2:169170667:G:A, 2:169172011:TCA:T, 2:169172035:T:A, 2:169172038:T:A, 2:169172045:A:C, 2:169172054:G:T, 2:169172059:T:G, 2:169172060:C:T, 2:169172063:A:G, 2:169172069:A:G, 2:169172075:G:T, 2:169172075:G:C, 2:169172077:G:A, 2:169172087:G:A, 2:169172107:T:A, 2:169172107:T:G, 2:169172110:C:G, 2:169172113:A:G, 2:169172114:C:T, 2:169172116:G:A, 2:169172121:G:T, 2:169172122:C:A, 2:169172134:T:C, 2:169173105:G:C, 2:169173114:T:G, 2:169173116:T:C, 2:169173120:C:T, 2:169173129:C:T, 2:169173131:T:C, 2:169173137:C:T, 2:169173137:C:G, 2:169173137:C:A, 2:169173138:C:T, 2:169173141:T:G, 2:169173143:C:T, 2:169173152:C:T, 2:169173162:T:C, 2:169173167:C:A, 2:169173173:T:C, 2:169173177:T:C, 2:169173186:T:G, 2:169173194:G:A, 2:169173198:A:C, 2:169173199:G:T, 2:169173200:T:C, 2:169173206:C:T, 2:169173210:G:C, 2:169173212:T:C, 2:169173215:G:A, 2:169173928:C:T, 2:169173930:A:T, 2:169173940:C:A, 2:169173954:C:A, 2:169173958:C:T, 2:169173961:T:C, 2:169173964:C:A, 2:169173971:A:C, 2:169173972:C:T, 2:169173974:C:A, 2:169173975:T:G, 2:169173977:C:A, 2:169173978:C:T, 2:169173984:T:C, 2:169173985:G:T, 2:169173997:G:T, 2:169173997:G:A, 2:169174005:G:A, 2:169174013:A:T, 2:169174014:A:T, 2:169174020:C:A, 2:169174029:C:T, 2:169174037:G:T, 2:169174041:G:T, 2:169174045:A:G, 2:169174046:G:T, 2:169174047:T:C, 2:169174065:G:A, 2:169174076:AC:A, 2:169174081:C:G, 2:169174084:T:G, 2:169174087:A:T, 2:169174097:C:A, 2:169174099:G:C, 2:169174099:G:T, 2:169174104:G:A, 2:169174110:G:A, 2:169174112:G:C, 2:169174132:A:G, 2:169174141:C:T, 2:169174157:G:T, 2:169174158:T:G, 2:169174162:TC:T, 2:169175192:C:A, 2:169175201:A:C, 2:169175202:G:C, 2:169175217:A:T, 2:169175219:C:A, 2:169175237:T:C, 2:169175243:T:C, 2:169175247:A:T, 2:169175253:T:C, 2:169175258:G:T, 2:169175274:C:T, 2:169175277:C:T, 2:169175283:A:T, 2:169175294:C:A, 2:169175294:C:T, 2:169175310:G:C, 2:169175310:G:T, 2:169175316:G:A, 2:169175322:G:A, 2:169175324:G:C, 2:169175330:T:C, 2:169175331:C:G, 2:169175333:T:C, 2:169175342:T:A, 2:169175355:T:C, 2:169175366:C:T, 2:169175368:T:A, 2:169175374:C:G, 2:169175374:C:A, 2:169175379:T:C, 2:169175385:T:C, 2:169176411:T:C, 2:169176417:T:C, 2:169176424:C:A, 2:169176435:T:G, 2:169176438:G:A, 2:169176441:C:G, 2:169176444:G:T, 2:169176447:C:T, 2:169176449:C:A, 2:169176450:A:G, 2:169176451:T:C, 2:169176453:G:A, 2:169176454:G:T, 2:169176457:T:C, 2:169176459:C:G, 2:169176463:A:G, 2:169176465:G:A, 2:169176465:G:T, 2:169176467:G:C, 2:169176477:A:G, 2:169176489:C:A, 2:169176489:C:T, 2:169176497:A:C, 2:169176502:G:A, 2:169176511:A:T, 2:169176514:T:C, 2:169176516:A:C, 2:169176522:T:C, 2:169176533:C:G, 2:169176538:T:G, 2:169176544:A:G, 2:169176550:G:A, 2:169176552:G:C, 2:169176564:T:C, 2:169176571:T:C, 2:169176573:C:T, 2:169176577:A:G, 2:169176582:T:C, 2:169176588:A:G, 2:169177802:C:A, 2:169177806:T:C, 2:169177808:G:C, 2:169177811:TG:T, 2:169177814:C:T, 2:169177826:T:C, 2:169177827:A:G, 2:169177832:T:A, 2:169177841:A:T, 2:169177844:G:T, 2:169177846:T:G, 2:169177866:GTGTC:G, 2:169177878:T:C, 2:169177887:C:T, 2:169177889:T:C, 2:169177890:ATT:A, 2:169177890:A:G, 2:169177901:T:G, 2:169177907:A:G, 2:169177922:C:T, 2:169177934:T:TA, 2:169177934:T:A, 2:169177940:G:A, 2:169177953:T:C, 2:169177962:C:A, 2:169177980:C:A, 2:169177985:T:C, 2:169177986:C:T, 2:169177986:C:CG, 2:169177988:T:A, 2:169177998:G:A, 2:169178000:C:T, 2:169178001:G:A, 2:169178019:C:T, 2:169181448:T:C, 2:169181451:A:T, 2:169181455:A:G, 2:169181457:C:T, 2:169181462:G:C, 2:169181492:GGT:G, 2:169181505:G:T, 2:169181509:T:A, 2:169181511:C:T, 2:169181514:T:C, 2:169181523:T:C, 2:169181533:T:C, 2:169181541:A:G, 2:169181552:G:C, 2:169181556:G:T, 2:169181566:T:C, 2:169181569:C:T, 2:169181569:C:A, 2:169181572:C:G, 2:169181574:C:T, 2:169181577:C:G, 2:169181581:T:G, 2:169181592:T:C, 2:169181596:C:T, 2:169181604:G:T, 2:169181606:C:G, 2:169181615:G:T, 2:169181616:T:C, 2:169182177:G:A, 2:169182180:G:A, 2:169182183:G:C, 2:169182198:G:T, 2:169182198:G:A, 2:169182204:C:G, 2:169182218:T:G, 2:169182227:T:C, 2:169182231:C:T, 2:169182233:C:G, 2:169182233:C:T, 2:169182248:A:G, 2:169182249:T:G, 2:169182249:T:A, 2:169182258:G:A, 2:169182267:T:C, 2:169182282:A:T, 2:169182285:G:A, 2:169182290:T:C, 2:169182291:C:A, 2:169182293:A:C, 2:169182297:G:A, 2:169182299:G:A, 2:169185509:A:G, 2:169185510:C:T, 2:169185519:C:T, 2:169185522:C:A, 2:169185524:A:C, 2:169185531:C:T, 2:169185537:C:T, 2:169185543:G:T, 2:169185555:T:C, 2:169185558:T:C, 2:169185560:G:T, 2:169185574:C:A, 2:169185578:T:C, 2:169185586:C:T, 2:169185586:C:G, 2:169185588:T:G, 2:169185605:C:T, 2:169185611:G:T, 2:169185614:T:C, 2:169185615:C:T, 2:169185618:TC:T, 2:169185623:T:C, 2:169185629:C:T, 2:169185630:T:C, 2:169185639:C:T, 2:169185641:C:A, 2:169185642:G:C, 2:169185647:A:G, 2:169185649:A:C, 2:169185653:A:G, 2:169185654:A:C, 2:169185657:C:A, 2:169185668:T:C, 2:169185704:T:C, 2:169185706:T:C, 2:169185732:G:A, 2:169185737:C:T, 2:169185744:T:C, 2:169185753:G:T, 2:169185758:A:G, 2:169185761:T:A, 2:169185793:T:A, 2:169185797:C:G, 2:169185808:TG:T, 2:169185812:G:T, 2:169185819:T:G, 2:169185825:T:A, 2:169185827:T:C, 2:169185830:G:C, 2:169185830:G:A, 2:169185831:A:G, 2:169185833:C:T, 2:169185836:A:G, 2:169185837:T:C, 2:169185840:C:T, 2:169185841:A:C, 2:169185846:C:T, 2:169185850:C:G, 2:169185851:T:A, 2:169185852:T:C, 2:169185864:C:G, 2:169185864:C:T, 2:169185870:G:A, 2:169185872:A:T, 2:169185882:A:G, 2:169185888:C:CAATA, 2:169185893:T:C, 2:169185897:C:T, 2:169185900:A:C, 2:169185910:G:C, 2:169185914:G:A, 2:169185929:C:A, 2:169185932:G:T, 2:169185936:G:A, 2:169185958:T:G, 2:169185964:G:T, 2:169185966:C:T, 2:169185968:G:C, 2:169185974:T:A, 2:169185976:G:C, 2:169185980:T:C, 2:169185992:A:G, 2:169185993:T:C, 2:169185995:G:A, 2:169186004:T:C, 2:169186014:T:C, 2:169187969:C:T, 2:169187972:C:T, 2:169187984:T:G, 2:169187985:C:T, 2:169187986:G:C, 2:169187991:T:C, 2:169188006:C:T, 2:169188013:G:C, 2:169188032:T:C, 2:169188033:C:A, 2:169188034:G:C, 2:169188051:C:T, 2:169188055:C:G, 2:169188060:A:G, 2:169188063:C:T, 2:169188066:G:C, 2:169188072:G:A, 2:169188077:G:T, 2:169188077:G:C, 2:169188080:G:A, 2:169188087:G:A, 2:169188099:G:T, 2:169188100:G:T, 2:169188101:T:G, 2:169188102:G:A, 2:169188108:G:C, 2:169188114:C:T, 2:169188133:A:T, 2:169188137:T:A, 2:169188139:C:G, 2:169188150:C:A, 2:169188151:G:T, 2:169188173:C:T, 2:169188179:T:C, 2:169188185:G:T, 2:169188191:T:C, 2:169188192:G:T, 2:169188194:T:A, 2:169188203:C:T, 2:169188204:A:C, 2:169188206:G:C, 2:169188218:C:G, 2:169188219:A:C, 2:169188222:C:G, 2:169188223:C:A, 2:169188224:C:T, 2:169188229:G:C, 2:169188236:T:G, 2:169188236:T:C, 2:169188239:T:G, 2:169188245:C:G, 2:169188245:C:T, 2:169191848:T:C, 2:169191848:T:G, 2:169191859:T:C, 2:169191860:A:C, 2:169191865:C:T, 2:169191866:A:G, 2:169191869:T:C, 2:169191872:A:G, 2:169191873:T:A, 2:169191876:A:T, 2:169191883:G:A, 2:169191893:T:C, 2:169191896:T:C, 2:169191901:C:A, 2:169191906:C:A, 2:169191911:T:C, 2:169191916:T:A, 2:169191917:C:A, 2:169191919:T:C, 2:169191929:T:C, 2:169191935:C:G, 2:169191938:C:T, 2:169191959:A:G, 2:169191960:C:G, 2:169191968:T:C, 2:169191985:G:A, 2:169191986:G:A, 2:169191991:T:C, 2:169192003:A:G, 2:169192008:C:G, 2:169192013:A:G, 2:169192022:A:G, 2:169192023:G:C, 2:169193778:T:C, 2:169193791:T:A, 2:169193808:T:A, 2:169193817:C:T, 2:169193822:C:T, 2:169193829:C:T, 2:169193834:G:C, 2:169193854:A:G, 2:169193855:C:G, 2:169193856:T:C, 2:169193869:C:T, 2:169193881:G:A, 2:169196916:G:C, 2:169196919:G:C, 2:169196920:C:T, 2:169196934:G:T, 2:169196936:A:C, 2:169196938:C:A, 2:169196940:A:G, 2:169196953:C:G, 2:169196958:T:C, 2:169196961:C:T, 2:169196969:A:T, 2:169197009:C:T, 2:169197015:C:T, 2:169197024:T:C, 2:169198794:G:A, 2:169198797:G:C, 2:169198799:G:T, 2:169198804:C:A, 2:169198810:T:C, 2:169198813:T:G, 2:169198816:C:G, 2:169198816:C:T, 2:169198818:C:G, 2:169198825:C:T, 2:169198828:T:C, 2:169198830:T:A, 2:169198833:C:T, 2:169198834:C:T, 2:169198846:A:G, 2:169198846:A:T, 2:169198851:C:A, 2:169198856:A:C, 2:169198857:A:G, 2:169198860:C:T, 2:169198862:A:C, 2:169198865:A:T, 2:169198873:T:A, 2:169198875:T:C, 2:169198878:C:A, 2:169198905:C:A, 2:169198912:C:A, 2:169201641:A:C, 2:169201651:T:C, 2:169201654:T:G, 2:169201654:T:C, 2:169201660:T:C, 2:169201669:T:A, 2:169201675:C:G, 2:169201676:C:T, 2:169201679:T:C, 2:169201686:A:C, 2:169201693:C:A, 2:169201693:C:T, 2:169201696:G:A, 2:169201705:C:T, 2:169201714:T:C, 2:169201729:G:A, 2:169201739:T:G, 2:169201761:T:TG, 2:169201763:C:A, 2:169201766:C:T, 2:169201774:C:CATTGTAGT, 2:169201775:C:A, 2:169201779:AC:A, 2:169201794:G:C, 2:169201795:T:C, 2:169201804:C:T, 2:169201810:G:C, 2:169201813:T:A, 2:169201817:G:C, 2:169201822:C:T, 2:169201826:G:A, 2:169201828:C:A, 2:169201832:T:C, 2:169201834:G:T, 2:169201844:A:T, 2:169201850:T:C, 2:169201855:G:A, 2:169201856:A:G, 2:169201861:G:C, 2:169202755:C:T, 2:169202763:A:T, 2:169202764:C:G, 2:169202767:T:A, 2:169202769:C:G, 2:169202771:T:C, 2:169202776:T:C, 2:169202796:G:T, 2:169202807:C:A, 2:169202812:T:A, 2:169202816:A:G, 2:169202818:T:A, 2:169202820:T:A, 2:169202824:G:C, 2:169202825:A:T, 2:169202826:G:C, 2:169202827:A:C, 2:169202861:C:T, 2:169202869:C:A, 2:169202870:G:A, 2:169202873:C:G, 2:169202885:C:A, 2:169202888:T:C, 2:169202889:G:T, 2:169202890:C:T, 2:169202895:C:G, 2:169202902:T:C, 2:169202905:T:C, 2:169202908:G:A, 2:169202909:C:T, 2:169202914:T:C, 2:169202918:A:G, 2:169202921:T:G, 2:169202929:T:C, 2:169202930:G:T, 2:169202956:G:A, 2:169203984:G:A, 2:169203994:T:C, 2:169204011:T:C, 2:169204011:T:A, 2:169204017:T:C, 2:169204020:T:C, 2:169204021:C:T, 2:169204022:A:C, 2:169204033:T:A, 2:169204038:T:C, 2:169204039:G:C, 2:169204048:G:T, 2:169204050:T:A, 2:169204051:T:A, 2:169204052:C:A, 2:169204060:C:T, 2:169204080:T:A, 2:169204083:G:A, 2:169204083:G:T, 2:169204093:T:A, 2:169204105:C:T, 2:169204110:T:C, 2:169204116:G:C, 2:169204119:C:T, 2:169204120:C:T, 2:169204123:CAT:C, 2:169204123:C:T, 2:169204128:T:A, 2:169204138:G:A, 2:169204146:C:A, 2:169204158:A:G, 2:169204162:C:T, 2:169204176:T:C, 2:169204182:C:T, 2:169204183:C:T, 2:169204189:G:C, 2:169204191:G:C, 2:169204192:T:A, 2:169204207:G:C, 2:169204207:G:GGA, 2:169204215:G:A, 2:169204216:C:A, 2:169204224:A:G, 2:169204240:C:T, 2:169204242:C:A, 2:169204257:C:T, 2:169204261:C:G, 2:169204266:C:T, 2:169205486:C:T, 2:169205492:C:G, 2:169205510:C:T, 2:169205515:T:C, 2:169205518:T:C, 2:169205522:G:T, 2:169205534:TG:T, 2:169205564:G:C, 2:169205593:C:T, 2:169205597:C:T, 2:169205600:T:C, 2:169205635:T:G, 2:169205638:C:T, 2:169206022:C:T, 2:169206032:G:A, 2:169206035:T:A, 2:169206065:C:CG, 2:169206066:G:T, 2:169206072:T:C, 2:169206078:T:G, 2:169206080:C:A, 2:169206082:G:C, 2:169206084:T:C, 2:169206086:G:C, 2:169206089:C:A, 2:169206092:T:A, 2:169206102:T:C, 2:169206114:T:G, 2:169206123:G:C, 2:169206135:A:G, 2:169206143:C:A, 2:169206147:T:C, 2:169206154:C:A, 2:169206156:A:T, 2:169206164:G:A, 2:169206171:C:A, 2:169206174:C:T, 2:169206177:C:G, 2:169206333:A:C, 2:169206356:A:T, 2:169206372:T:C, 2:169206375:C:T, 2:169206389:C:T, 2:169206392:A:G, 2:169206398:G:A, 2:169206410:T:A, 2:169206414:T:A, 2:169206420:A:G, 2:169206437:C:T, 2:169206438:T:C, 2:169206441:C:T, 2:169206443:T:G, 2:169206446:T:C, 2:169206450:G:T, 2:169206456:T:A, 2:169206464:C:G, 2:169206473:T:C, 2:169206474:T:C, 2:169206479:G:A, 2:169206485:A:C, 2:169206486:A:C, 2:169206488:G:A, 2:169206506:G:C, 2:169206515:T:C, 2:169206518:A:G, 2:169206522:T:C, 2:169206552:G:A, 2:169206563:G:A, 2:169206575:C:G, 2:169206587:T:C, 2:169206588:C:T, 2:169206590:C:T, 2:169206590:C:A, 2:169206591:T:A, 2:169206592:T:G, 2:169206596:AG:A, 2:169206597:G:T, 2:169206599:G:A, 2:169206602:C:T, 2:169206605:A:C, 2:169206608:G:A, 2:169206617:C:T, 2:169206619:T:G, 2:169206624:G:A, 2:169206626:G:T, 2:169206651:A:G, 2:169206653:A:G, 2:169206657:G:A, 2:169206671:T:C, 2:169206686:G:A, 2:169206690:T:C, 2:169206692:T:C, 2:169206698:A:G, 2:169206713:C:G, 2:169206713:C:A, 2:169206716:G:T, 2:169206730:G:T, 2:169206734:A:C, 2:169206738:T:C, 2:169206740:G:A, 2:169206743:A:C, 2:169206744:C:G, 2:169206754:C:A, 2:169206757:G:T, 2:169206759:T:A, 2:169206766:G:C, 2:169206774:T:C, 2:169206774:T:A, 2:169206777:C:T, 2:169206786:G:A, 2:169206789:C:T, 2:169206793:G:T, 2:169206807:T:C, 2:169206809:C:A, 2:169206812:G:C, 2:169206813:C:T, 2:169206821:A:T, 2:169206823:C:A, 2:169206824:T:G, 2:169206828:T:C, 2:169206844:C:T, 2:169206857:T:C, 2:169206862:A:T, 2:169206878:T:C, 2:169206882:G:A, 2:169206888:G:A, 2:169206893:C:A, 2:169206894:G:A, 2:169206896:C:T, 2:169206905:C:A, 2:169206906:G:T, 2:169206908:A:C, 2:169206909:T:A, 2:169206913:T:A, 2:169206929:T:C, 2:169206933:T:C, 2:169206951:T:C, 2:169206954:C:T, 2:169206960:A:G, 2:169206961:A:C, 2:169206970:C:A, 2:169206972:A:G, 2:169206980:T:A, 2:169206980:T:C, 2:169206983:C:T, 2:169206983:C:A, 2:169207011:G:C, 2:169207011:G:A, 2:169207016:G:A, 2:169207025:C:T, 2:169207032:A:C, 2:169207043:G:A, 2:169207046:C:A, 2:169207047:G:A, 2:169207064:A:C, 2:169207094:T:C, 2:169207094:T:G, 2:169207110:G:A, 2:169207121:T:C, 2:169207125:G:A, 2:169207145:G:A, 2:169207147:C:T, 2:169207163:T:A, 2:169207164:T:G, 2:169207176:G:T, 2:169207181:T:C, 2:169207185:T:C, 2:169207188:T:G, 2:169207203:C:T, 2:169207208:A:G, 2:169207218:C:T, 2:169207220:G:A, 2:169207220:G:T, 2:169207227:A:G, 2:169207232:T:C, 2:169207246:A:T, 2:169209451:A:G, 2:169209456:C:A, 2:169209458:A:G, 2:169209459:C:T, 2:169209462:A:C, 2:169209472:A:C, 2:169209473:A:C, 2:169209473:A:G, 2:169209476:C:T, 2:169209477:C:A, 2:169209479:C:T, 2:169209480:G:A, 2:169209485:C:G, 2:169209494:C:T, 2:169209497:A:G, 2:169209501:C:T, 2:169209515:T:C, 2:169209516:T:A, 2:169209517:C:A, 2:169209527:G:T, 2:169209532:ATCTG:A, 2:169209533:T:C, 2:169209537:G:T, 2:169209545:C:G, 2:169209546:T:C, 2:169209549:G:C, 2:169209554:G:A, 2:169209554:G:C, 2:169209555:C:T, 2:169209563:G:T, 2:169209578:C:T, 2:169209591:A:G, 2:169209602:C:G, 2:169209605:G:A, 2:169209606:A:T, 2:169209614:T:C, 2:169209615:C:A, 2:169209620:T:C, 2:169209620:T:A, 2:169209623:A:G, 2:169209626:T:G, 2:169209629:A:G, 2:169209632:G:A, 2:169209633:C:G, 2:169209633:C:T, 2:169209635:T:C, 2:169211966:A:G, 2:169211968:C:A, 2:169211970:T:C, 2:169211974:C:T, 2:169211977:C:T, 2:169211979:A:G, 2:169211982:G:A, 2:169211988:A:G, 2:169211991:G:T, 2:169212008:C:A, 2:169212018:C:A, 2:169212022:A:G, 2:169212025:C:T, 2:169212037:A:C, 2:169212043:T:C, 2:169212045:G:A, 2:169212057:A:T, 2:169212079:A:T, 2:169212081:C:T, 2:169212085:T:C, 2:169212088:C:T, 2:169212094:T:C, 2:169212096:A:C, 2:169212097:G:C, 2:169212100:T:G, 2:169212114:C:G, 2:169212115:A:T, 2:169212118:C:A, 2:169212118:C:G, 2:169212132:C:A, 2:169212132:C:CCAAAAGCATT, 2:169212133:C:T, 2:169212136:C:T, 2:169212165:G:C, 2:169212169:T:G, 2:169212178:T:A, 2:169212180:C:G, 2:169212183:C:G, 2:169212184:A:C, 2:169212186:C:T, 2:169212198:T:C, 2:169212202:C:A, 2:169212204:G:A, 2:169213657:T:C, 2:169213664:G:T, 2:169213666:G:A, 2:169213669:A:G, 2:169213680:C:G, 2:169213690:T:A, 2:169213692:G:C, 2:169213711:C:G, 2:169213718:G:C, 2:169213722:G:A, 2:169213723:C:T, 2:169213725:C:T, 2:169213729:T:C, 2:169213735:T:A, 2:169213735:T:C, 2:169213737:T:A, 2:169213749:A:G, 2:169213750:T:C, 2:169213753:C:T, 2:169213765:C:G, 2:169213765:C:T, 2:169213768:C:T, 2:169213771:T:C, 2:169213781:G:T, 2:169213783:A:G, 2:169213785:G:A, 2:169213791:T:C, 2:169213792:G:A, 2:169213798:C:A, 2:169213813:G:A, 2:169213824:T:C, 2:169213825:G:A, 2:169213833:A:T, 2:169213840:G:A, 2:169213843:C:T, 2:169213851:T:A, 2:169213851:T:C, 2:169213863:C:T, 2:169213870:T:C, 2:169216252:C:G, 2:169216267:T:C, 2:169216273:C:T, 2:169216291:C:T, 2:169216296:A:T, 2:169216305:G:A, 2:169216311:C:T, 2:169216320:T:A, 2:169216324:C:T, 2:169216327:G:A, 2:169216328:G:C, 2:169216329:T:C, 2:169216335:G:A, 2:169216356:G:T, 2:169216360:CA:C, 2:169216365:A:C, 2:169216371:G:C, 2:169216375:T:C, 2:169216390:G:A, 2:169216392:A:G, 2:169216395:C:A, 2:169216411:G:A, 2:169216428:T:G, 2:169220455:C:G, 2:169220455:C:T, 2:169220457:C:G, 2:169220461:C:T, 2:169220467:C:T, 2:169220470:C:T, 2:169220474:T:C, 2:169220478:C:A, 2:169220482:T:C, 2:169220490:C:G, 2:169220491:C:T, 2:169220500:G:C, 2:169220505:G:T, 2:169220508:C:T, 2:169220512:C:G, 2:169220514:T:C, 2:169220518:C:A, 2:169220522:C:G, 2:169220541:A:C, 2:169220544:T:G, 2:169220547:C:T, 2:169220548:C:T, 2:169220550:T:G, 2:169220551:G:C, 2:169220551:G:A, 2:169220557:T:A, 2:169220558:C:G, 2:169225312:C:T, 2:169225315:T:C, 2:169225324:T:C, 2:169225332:T:C, 2:169225338:G:C, 2:169225356:A:C, 2:169225357:T:A, 2:169225365:A:G, 2:169225368:G:A, 2:169225378:T:C, 2:169225380:G:A, 2:169225390:C:A, 2:169225393:T:C, 2:169225398:A:G, 2:169225399:T:C, 2:169225405:C:T, 2:169225405:C:A, 2:169225411:C:T, 2:169225413:G:A, 2:169225413:G:T, 2:169225420:T:A, 2:169225428:T:A, 2:169225440:C:T, 2:169225450:C:T, 2:169226424:G:A, 2:169226424:G:T, 2:169226424:G:C, 2:169226434:C:T, 2:169226436:A:G, 2:169226437:AT:A, 2:169226441:A:G, 2:169226446:T:G, 2:169226447:T:C, 2:169226456:T:G, 2:169226472:C:T, 2:169226495:A:C, 2:169226498:G:A, 2:169226499:G:A, 2:169226503:C:T, 2:169226505:T:C, 2:169226507:G:A, 2:169226510:T:A, 2:169226510:T:C, 2:169226520:T:G, 2:169226524:C:A, 2:169226549:A:G, 2:169226552:A:G, 2:169226558:T:G, 2:169226563:TAC:T, 2:169226567:G:C, 2:169226571:T:C, 2:169226579:G:A, 2:169226580:G:C, 2:169226581:T:G, 2:169226584:A:T, 2:169226588:T:C, 2:169231715:T:A, 2:169231716:C:T, 2:169231728:A:G, 2:169231734:T:C, 2:169231735:C:A, 2:169231738:G:A, 2:169231743:A:G, 2:169231745:A:T, 2:169231780:G:T, 2:169231788:T:C, 2:169231804:A:C, 2:169231811:G:C, 2:169231818:C:A, 2:169231825:A:G, 2:169231827:G:A, 2:169231839:A:G, 2:169233416:G:T, 2:169233425:G:A, 2:169233431:T:A, 2:169233435:C:A, 2:169233438:C:T, 2:169233444:T:G, 2:169233455:C:A, 2:169233464:T:C, 2:169233470:A:G, 2:169233474:C:A, 2:169233483:G:C, 2:169233483:G:T, 2:169233493:A:T, 2:169233496:C:A, 2:169233499:C:G, 2:169233510:G:C, 2:169233516:C:T, 2:169233518:C:G, 2:169233522:G:T, 2:169233524:G:C, 2:169233524:G:A, 2:169233525:T:C, 2:169233530:C:G, 2:169233537:T:C, 2:169233542:T:G, 2:169233545:A:C, 2:169233557:A:C, 2:169233569:G:A, 2:169233570:C:T, 2:169233577:G:T, 2:169233578:T:C, 2:169233581:C:A, 2:169233588:T:C, 2:169235839:C:A, 2:169235848:T:C, 2:169235848:T:G, 2:169235850:G:T, 2:169235851:C:T, 2:169235854:T:G, 2:169235862:C:T, 2:169235867:A:C, 2:169235868:T:C, 2:169235868:T:A, 2:169235870:G:T, 2:169235877:T:C, 2:169235878:T:C, 2:169235884:C:T, 2:169235896:T:C, 2:169235898:T:A, 2:169235913:T:C, 2:169235918:G:C, 2:169235929:G:T, 2:169235934:T:C, 2:169235937:G:A, 2:169235942:G:C, 2:169235949:G:A, 2:169235950:T:C, 2:169235972:C:A, 2:169235974:T:C, 2:169235979:T:C, 2:169235982:A:C, 2:169235986:T:TG, 2:169235989:C:T, 2:169235991:G:A, 2:169235992:T:C, 2:169235995:G:A, 2:169236004:C:T, 2:169236010:T:C, 2:169236012:C:T, 2:169236018:C:T, 2:169236019:G:A, 2:169236023:G:C, 2:169236025:T:C, 2:169236026:G:GC, 2:169236027:C:T, 2:169236031:G:A, 2:169236033:T:G, 2:169236037:G:A, 2:169236040:C:T, 2:169236042:C:T, 2:169236046:C:T, 2:169236049:A:T, 2:169237107:T:C, 2:169237112:G:C, 2:169237112:G:A, 2:169237113:G:A, 2:169237122:C:T, 2:169237144:G:GT, 2:169237171:G:T, 2:169237178:T:C, 2:169237185:T:G, 2:169237187:G:C, 2:169237199:G:T, 2:169237202:T:C, 2:169237205:A:C, 2:169237208:G:A, 2:169237209:C:T, 2:169237210:A:C, 2:169237222:G:T, 2:169237229:T:C, 2:169237233:G:C, 2:169237238:A:G, 2:169237251:C:T, 2:169237252:A:C, 2:169237269:T:C, 2:169237275:T:C, 2:169237276:ACTGTCAAATAC:A, 2:169237279:G:C, 2:169237283:A:C, 2:169237284:A:G, 2:169238097:T:A, 2:169238098:C:T, 2:169238101:T:A, 2:169238105:T:A, 2:169238124:C:G, 2:169238128:G:T, 2:169238138:G:C, 2:169238144:C:A, 2:169238159:T:C, 2:169238164:C:T, 2:169238171:T:C, 2:169238183:C:G, 2:169238186:C:T, 2:169238189:C:A, 2:169238207:T:C, 2:169238210:C:T, 2:169238218:G:A, 2:169238228:T:C, 2:169238233:A:G, 2:169238236:T:G, 2:169238248:C:T, 2:169238248:C:A, 2:169238249:T:G, 2:169238252:C:A, 2:169238258:T:C, 2:169238265:G:T, 2:169238266:T:A, 2:169238267:T:C, 2:169238269:T:G, 2:169238271:A:T, 2:169238273:T:C, 2:169238276:C:T, 2:169238281:A:G, 2:169238290:A:G, 2:169238293:C:T, 2:169238300:A:T, 2:169239525:A:G, 2:169239529:G:A, 2:169239530:T:C, 2:169239541:G:C, 2:169239545:T:C, 2:169239551:C:A, 2:169239559:A:G, 2:169239562:A:T, 2:169239563:T:C, 2:169239564:G:C, 2:169239569:C:T, 2:169239571:G:C, 2:169239580:G:A, 2:169239589:A:G, 2:169239592:G:A, 2:169239592:G:T, 2:169239600:C:T, 2:169239613:T:C, 2:169239614:G:A, 2:169239625:G:C, 2:169239625:G:A, 2:169239633:A:C, 2:169239637:T:C, 2:169239643:T:C, 2:169239645:A:T, 2:169239646:T:C, 2:169239649:A:G, 2:169239661:G:T, 2:169239661:G:C, 2:169239677:C:T, 2:169239680:G:A, 2:169239681:TA:T, 2:169239682:A:C, 2:169239706:T:C, 2:169239718:G:C, 2:169239728:C:T, 2:169239748:C:T, 2:169239750:A:T, 2:169239752:T:C, 2:169239754:A:G, 2:169239755:A:T, 2:169239757:T:C, 2:169239758:C:A, 2:169239774:A:C, 2:169240946:A:G, 2:169240956:T:C, 2:169240958:T:C, 2:169240961:C:A, 2:169240969:C:T, 2:169240970:T:C, 2:169240973:G:A, 2:169240976:C:A, 2:169240985:T:C, 2:169240991:A:G, 2:169240993:A:C, 2:169241006:C:A, 2:169241009:T:C, 2:169241018:G:A, 2:169241029:A:G, 2:169241032:C:T, 2:169241032:C:G, 2:169241033:C:T, 2:169241036:C:G, 2:169241038:C:T, 2:169241047:C:T, 2:169241057:C:T, 2:169241062:A:G, 2:169241063:T:C, 2:169241072:C:T, 2:169241072:C:G, 2:169241089:C:A, 2:169241093:T:C, 2:169241096:G:C, 2:169241096:G:A, 2:169241097:A:C, 2:169241107:G:C, 2:169241114:T:C, 2:169241117:G:T, 2:169241126:T:A, 2:169241132:C:A, 2:169241134:C:T, 2:169241137:A:G, 2:169241144:C:G, 2:169241145:G:T, 2:169241159:G:C, 2:169241195:T:C, 2:169241201:A:G, 2:169241215:G:A, 2:169241216:A:G, 2:169241219:G:C, 2:169241221:C:A, 2:169241224:GT:G, 2:169241227:T:C, 2:169241236:C:G, 2:169241239:G:GCATTGTGC, 2:169241240:C:T, 2:169241257:C:A, 2:169241266:C:A, 2:169241269:T:C, 2:169241276:G:A, 2:169241278:C:T, 2:169241296:T:G, 2:169241311:C:T, 2:169241331:T:G, 2:169241334:A:T, 2:169241341:T:A, 2:169241348:T:C, 2:169241354:G:T, 2:169241354:G:A, 2:169241357:G:T, 2:169241363:T:C, 2:169242954:A:T, 2:169242962:C:T, 2:169242967:T:C, 2:169242969:A:T, 2:169242970:T:C, 2:169242979:T:C, 2:169242997:C:T, 2:169243000:T:A, 2:169243007:G:A, 2:169243020:A:C, 2:169243030:T:C, 2:169243033:C:G, 2:169243039:G:A, 2:169243043:A:C, 2:169243045:T:C, 2:169243063:C:T, 2:169243413:C:A, 2:169243416:A:C, 2:169243444:C:T, 2:169243460:AT:A, 2:169243463:G:C, 2:169243469:T:A, 2:169243469:T:C, 2:169243471:C:T, 2:169243473:TC:T, 2:169243474:C:G, 2:169243475:G:A, 2:169243495:T:A, 2:169243498:C:G, 2:169243498:C:T, 2:169243502:G:A, 2:169243505:G:T, 2:169243516:G:A, 2:169244692:C:T, 2:169244700:C:A, 2:169244701:T:C, 2:169244732:C:T, 2:169244734:G:A, 2:169244744:C:G, 2:169244748:G:T, 2:169244750:T:C, 2:169244761:C:T, 2:169244762:A:G, 2:169244780:T:C, 2:169244788:G:A, 2:169244803:G:A, 2:169244806:G:T, 2:169244807:G:T, 2:169244807:G:A, 2:169244813:G:A, 2:169244815:G:A, 2:169244816:T:C, 2:169244828:G:C, 2:169244839:C:T, 2:169244839:C:A, 2:169244840:C:T, 2:169244843:C:G, 2:169244857:C:G, 2:169244864:C:T, 2:169244870:G:A, 2:169244875:T:A, 2:169244875:T:C, 2:169244878:G:T, 2:169244881:G:C, 2:169244891:C:T, 2:169244894:C:T, 2:169244896:T:C, 2:169244905:G:A, 2:169244912:C:T, 2:169244915:A:T, 2:169244920:G:A, 2:169244920:GA:G, 2:169244926:G:T, 2:169244926:G:C, 2:169244929:T:G, 2:169244930:T:G, 2:169244930:T:C, 2:169244932:T:G, 2:169246707:A:C, 2:169246713:C:T, 2:169246714:C:T, 2:169246737:T:C, 2:169246740:T:C, 2:169246758:T:C, 2:169246765:G:C, 2:169246771:A:C, 2:169246772:A:C, 2:169246780:C:T, 2:169246788:C:A, 2:169246801:G:C, 2:169246818:C:A, 2:169246830:G:C, 2:169246830:G:A, 2:169246833:G:A, 2:169246848:TC:T, 2:169246849:C:G, 2:169246852:C:G, 2:169246864:AG:A, 2:169246881:C:G, 2:169246887:C:G, 2:169246889:A:C, 2:169246891:A:C, 2:169246894:G:A, 2:169246896:C:T, 2:169246908:C:T, 2:169246909:G:A, 2:169246912:G:A, 2:169246921:G:A, 2:169246938:T:C, 2:169246939:G:A, 2:169246950:C:T, 2:169246951:C:G, 2:169246959:T:C, 2:169246977:G:A, 2:169246979:G:T, 2:169246981:T:C, 2:169246986:C:T, 2:169246986:C:A, 2:169247378:C:G, 2:169247386:A:G, 2:169247392:A:G, 2:169247398:T:C, 2:169247404:T:C, 2:169247410:T:C, 2:169247413:A:G, 2:169247416:A:G, 2:169247417:T:G, 2:169247428:C:T, 2:169247431:C:T, 2:169247432:T:A, 2:169247434:C:T, 2:169247436:G:C, 2:169247443:G:A, 2:169247444:T:C, 2:169247452:C:T, 2:169247456:C:T, 2:169247461:G:T, 2:169247462:C:A, 2:169247474:G:A, 2:169247485:C:G, 2:169247496:G:C, 2:169247498:C:T, 2:169247498:C:A, 2:169247501:T:TA, 2:169247505:A:C, 2:169247507:A:C, 2:169247508:T:A, 2:169256106:C:G, 2:169256108:C:T, 2:169256109:C:T, 2:169256115:T:C, 2:169256121:G:A, 2:169256127:A:G, 2:169256131:A:T, 2:169256138:A:T, 2:169256141:T:C, 2:169256145:C:G, 2:169256154:C:T, 2:169256164:T:A, 2:169256165:C:T, 2:169256177:T:C, 2:169256178:C:A, 2:169256186:C:T, 2:169256196:T:C, 2:169256200:A:T, 2:169256206:A:T, 2:169256208:A:G, 2:169256213:T:A, 2:169256217:C:A, 2:169256217:C:T, 2:169256218:C:A, 2:169256220:A:G, 2:169256229:G:A, 2:169256234:G:T, 2:169257127:C:A, 2:169257128:A:C, 2:169257149:G:T, 2:169257154:C:G, 2:169257158:G:A, 2:169257167:T:G, 2:169257175:G:A, 2:169257177:C:A, 2:169257192:G:C, 2:169257197:T:C, 2:169257200:A:G, 2:169257203:C:T, 2:169257209:T:C, 2:169257220:G:A, 2:169257223:C:G, 2:169257228:C:G, 2:169257232:T:C, 2:169257242:A:G, 2:169257251:T:A, 2:169259024:C:A, 2:169259025:C:A, 2:169259034:G:C, 2:169259049:G:T, 2:169259056:G:T, 2:169259062:T:G, 2:169259064:A:C, 2:169259097:G:C, 2:169259105:C:T, 2:169259107:T:C, 2:169259107:T:G, 2:169259111:A:T, 2:169259115:A:G, 2:169259118:C:T, 2:169259127:T:C, 2:169259128:G:T, 2:169259142:T:C, 2:169259146:G:C, 2:169259146:G:T, 2:169259155:A:C, 2:169259160:C:G, 2:169259175:C:T, 2:169259175:C:G, 2:169259182:C:T, 2:169259184:T:C, 2:169259187:T:G, 2:169259188:C:A, 2:169259190:A:T, 2:169259193:C:G, 2:169259197:T:C, 2:169259203:C:A, 2:169270902:A:T, 2:169270902:A:C, 2:169270902:A:G, 2:169270907:T:C, 2:169270912:T:C, 2:169270917:C:A, 2:169270918:T:G, 2:169270940:T:C, 2:169270944:C:G, 2:169270946:T:C, 2:169270960:A:G, 2:169270961:T:C, 2:169270968:G:T, 2:169270973:G:A, 2:169270987:A:G, 2:169270993:A:G, 2:169270994:C:A, 2:169270995:A:T, 2:169270998:G:C, 2:169271000:A:G, 2:169271002:G:A, 2:169271006:G:A, 2:169271008:T:A, 2:169271008:T:C, 2:169271012:C:T, 2:169271012:C:G, 2:169271015:A:G, 2:169271018:C:G, 2:169271021:G:C, 2:169271027:T:C, 2:169271029:A:G, 2:169271030:C:T, 2:169271034:T:A, 2:169271044:G:T, 2:169271050:G:T, 2:169271057:G:A, 2:169271075:C:T, 2:169271077:T:C, 2:169271078:G:T, 2:169271086:A:C, 2:169271089:A:G, 2:169271101:T:C, 2:169272927:C:T, 2:169272935:T:C, 2:169272950:T:A, 2:169272957:G:T, 2:169272962:C:A, 2:169272962:C:T, 2:169272970:G:T, 2:169272971:C:T, 2:169272987:C:G, 2:169272997:A:T, 2:169273001:T:C, 2:169273004:G:A, 2:169273005:TTC:T, 2:169273007:C:T, 2:169273020:C:T, 2:169273020:C:A, 2:169273022:C:T, 2:169273028:T:G, 2:169273028:T:A, 2:169273029:G:C, 2:169273032:C:G, 2:169273037:C:A, 2:169273043:T:C, 2:169273046:T:C, 2:169273059:G:A, 2:169273060:A:T, 2:169273061:T:C, 2:169275042:G:A, 2:169275042:G:T, 2:169275044:T:A, 2:169275045:G:A, 2:169275046:T:A, 2:169275051:G:C, 2:169275066:T:C, 2:169275071:C:T, 2:169275079:C:A, 2:169275096:A:G, 2:169275096:A:C, 2:169275098:T:C, 2:169275101:A:C, 2:169275107:G:A, 2:169275108:G:T, 2:169275119:G:C, 2:169275128:T:C, 2:169275131:G:A, 2:169275140:A:G, 2:169275141:C:T, 2:169275143:G:A, 2:169275153:T:C, 2:169275154:C:T, 2:169275158:T:C, 2:169275177:C:T, 2:169275186:A:T, 2:169275189:T:C, 2:169275192:C:G, 2:169275194:C:T, 2:169275195:C:T, 2:169275197:A:C, 2:169275201:G:A, 2:169275204:G:A, 2:169275206:G:A, 2:169275215:G:A, 2:169275216:A:C, 2:169275222:C:T, 2:169275234:T:A, 2:169277749:G:C, 2:169277755:C:T, 2:169277760:T:A, 2:169277767:C:T, 2:169277776:T:C, 2:169277778:T:C, 2:169277787:C:T, 2:169277790:G:C, 2:169277791:A:T, 2:169277802:T:C, 2:169277810:C:A, 2:169277822:A:T, 2:169277829:G:A, 2:169277843:C:T, 2:169277847:C:T, 2:169277853:T:C, 2:169277857:T:C, 2:169277863:C:T, 2:169277874:C:T, 2:169277880:C:T, 2:169277888:C:T, 2:169277890:T:C, 2:169277917:C:A, 2:169277925:C:T, 2:169277925:C:G, 2:169277930:C:G, 2:169277934:T:C, 2:169277944:A:G, 2:169277949:T:C, 2:169279378:G:T, 2:169279381:G:A, 2:169279381:G:T, 2:169279385:C:T, 2:169279403:G:C, 2:169279408:C:T, 2:169279420:G:T, 2:169279422:T:C, 2:169279423:A:G, 2:169279429:G:T, 2:169279438:T:G, 2:169279454:T:G, 2:169279463:C:G, 2:169279464:T:C, 2:169279465:A:C, 2:169279471:T:C, 2:169279481:T:A, 2:169279490:G:C, 2:169279513:T:C, 2:169279514:C:CCA, 2:169279525:T:C, 2:169279528:T:C, 2:169279529:C:G, 2:169279529:C:T, 2:169279550:T:G, 2:169279553:G:C, 2:169279556:C:T, 2:169279561:T:C, 2:169279564:A:C, 2:169279568:T:G, 2:169279569:T:A, 2:169279573:C:G, 2:169279573:C:T, 2:169279578:A:C, 2:169279580:T:A, 2:169279580:T:C, 2:169279583:CA:C, 2:169279588:G:T, 2:169279592:A:C, 2:169279595:C:A, 2:169280351:T:C, 2:169280354:T:C, 2:169280360:A:T, 2:169280361:C:T, 2:169280361:C:A, 2:169280364:T:C, 2:169280370:T:C, 2:169280374:A:C, 2:169280378:A:G, 2:169280385:G:T, 2:169280393:T:C, 2:169280396:T:C, 2:169280414:G:A, 2:169280423:C:G, 2:169280424:G:A, 2:169280427:T:G, 2:169280439:C:T, 2:169280443:G:C, 2:169280447:C:T, 2:169280451:A:G, 2:169280487:G:C, 2:169280493:T:C, 2:169280505:T:A, 2:169280505:T:C, 2:169280508:A:C, 2:169280510:G:T, 2:169280510:G:C, 2:169280511:C:A, 2:169280517:C:A, 2:169282881:T:C, 2:169282894:A:G, 2:169282899:C:T, 2:169282902:C:T, 2:169282902:C:A, 2:169282904:C:A, 2:169282906:C:G, 2:169282918:C:A, 2:169282921:C:G, 2:169282922:T:G, 2:169282924:C:T, 2:169282942:G:T, 2:169282944:C:T, 2:169282951:G:A, 2:169282953:C:G, 2:169282954:T:G, 2:169282959:C:T, 2:169282961:C:A, 2:169282981:A:G, 2:169282984:T:C, 2:169282984:T:A, 2:169282994:A:T, 2:169282995:T:C, 2:169282996:CA:C, 2:169282998:A:G, 2:169289025:C:A, 2:169289031:C:G, 2:169289039:G:T, 2:169289043:T:C, 2:169289046:T:A, 2:169289050:G:C, 2:169289056:T:C, 2:169289068:G:A, 2:169289070:G:A, 2:169289085:C:T, 2:169289095:G:T, 2:169289099:C:G, 2:169289109:T:C, 2:169289119:A:T, 2:169289125:A:T, 2:169289127:G:A, 2:169289146:C:A, 2:169290861:A:T, 2:169290870:G:C, 2:169290870:G:GT, 2:169290874:T:G, 2:169290878:C:A, 2:169290878:C:G, 2:169290895:T:G, 2:169290898:A:G, 2:169290904:C:T, 2:169290916:T:G, 2:169290934:C:G, 2:169290934:C:T, 2:169290935:G:A, 2:169290937:C:A, 2:169290946:G:A, 2:169290964:G:C, 2:169290989:G:A, 2:169290994:C:A, 2:169292255:C:T, 2:169292255:C:A, 2:169292259:C:T, 2:169292262:C:T, 2:169292265:C:T, 2:169292266:A:C, 2:169292267:T:G, 2:169292276:T:C, 2:169292280:T:C, 2:169292282:C:T, 2:169292286:C:T, 2:169292295:C:T, 2:169292298:C:T, 2:169292304:C:A, 2:169292306:C:G, 2:169292310:T:G, 2:169292314:A:T, 2:169292319:T:G, 2:169292319:T:C, 2:169292320:G:T, 2:169292322:A:G, 2:169292327:C:G, 2:169292355:C:G, 2:169292360:G:A, 2:169292360:G:T, 2:169292369:T:C, 2:169294147:C:A, 2:169294148:T:C, 2:169294159:TC:T, 2:169294160:C:T, 2:169294162:T:G, 2:169294163:C:T, 2:169294170:G:T, 2:169294178:A:G, 2:169294181:C:T, 2:169294186:T:C, 2:169294198:A:G, 2:169294199:C:T, 2:169294210:G:A, 2:169294214:T:A, 2:169294217:A:G, 2:169294228:C:T, 2:169294244:T:C, 2:169294247:G:A, 2:169294247:G:T, 2:169294249:A:G, 2:169294255:ATC:A, 2:169294255:A:T, 2:169294597:T:TAA, 2:169294601:G:T, 2:169294605:T:A, 2:169294606:T:A, 2:169294615:C:T, 2:169294632:T:C, 2:169294639:T:C, 2:169294649:C:A, 2:169294672:C:T, 2:169294674:C:T, 2:169294677:T:C, 2:169294683:C:A, 2:169294689:A:C, 2:169294690:G:T, 2:169294692:T:A, 2:169294692:T:C, 2:169294693:G:T, 2:169294695:T:G, 2:169294698:C:T, 2:169294702:T:C, 2:169294704:G:T, 2:169294705:G:T, 2:169294706:G:T, 2:169294707:T:C, 2:169294708:A:T, 2:169294710:T:C, 2:169294712:T:A, 2:169307279:A:C, 2:169307279:AC:A, 2:169307285:G:C, 2:169307294:A:C, 2:169307294:A:T, 2:169307303:A:C, 2:169307307:G:A, 2:169307307:G:C, 2:169307317:T:C, 2:169307320:C:T, 2:169307321:G:C, 2:169307323:G:C, 2:169307326:C:A, 2:169307330:C:A, 2:169307337:T:C, 2:169307339:A:C, 2:169307340:C:T, 2:169307341:T:C, 2:169307356:C:A, 2:169307356:C:T, 2:169307357:A:T, 2:169307371:T:C, 2:169307372:C:G, 2:169307373:T:A, 2:169307373:T:C, 2:169307379:C:T, 2:169307382:G:C, 2:169307384:G:C, 2:169307388:G:A, 2:169307388:G:T, 2:169307389:T:C, 2:169307394:T:C, 2:169307395:G:T, 2:169307397:G:T, 2:169318760:A:AC, 2:169318761:C:G, 2:169318761:C:T, 2:169318762:A:G, 2:169318770:T:C, 2:169318804:C:A, 2:169318825:T:A, 2:169318828:G:T, 2:169318839:C:T, 2:169318843:C:T, 2:169318845:C:T, 2:169318854:T:C, 2:169318875:G:C, 2:169320778:G:T, 2:169320782:C:A, 2:169320783:C:T, 2:169320786:T:A, 2:169320794:G:C, 2:169320798:C:A, 2:169320808:G:C, 2:169320834:C:G, 2:169320853:A:C, 2:169320864:G:T, 2:169320865:A:C, 2:169320869:T:C, 2:169320876:T:C, 2:169320884:T:C, 2:169362323:T:C, 2:169362326:C:T, 2:169362335:G:A, 2:169362336:G:A, 2:169362345:A:C, 2:169362347:G:A, 2:169362348:C:A, 2:169362363:G:A, 2:169362372:A:G, 2:169362374:G:C, 2:169362375:C:A, 2:169362378:C:T, 2:169362380:G:T, 2:169362381:C:G, 2:169362387:G:T, 2:169362392:C:G, 2:169128674:A:C, 2:169128677:C:T, 2:169128686:C:T, 2:169128691:T:C, 2:169128692:T:A, 2:169128694:G:A, 2:169128697:G:A, 2:169128700:T:G, 2:169128709:G:C, 2:169128719:T:C, 2:169128727:T:C, 2:169128743:C:G, 2:169128751:G:T, 2:169128778:G:T, 2:169128785:A:C, 2:169128797:T:G, 2:169128802:G:A, 2:169128820:T:C, 2:169128821:C:T, 2:169128829:A:T, 2:169128829:A:G, 2:169129011:A:T, 2:169129012:C:T, 2:169129015:G:T, 2:169129022:G:C, 2:169129023:A:G, 2:169129026:G:A, 2:169129033:C:A, 2:169129056:T:A, 2:169129073:C:A, 2:169129080:G:A, 2:169129085:C:T, 2:169132578:G:T, 2:169132599:G:A, 2:169132602:G:C, 2:169132617:A:T, 2:169132618:C:A, 2:169132630:G:T, 2:169132655:AT:A, 2:169132657:T:A, 2:169132663:C:T, 2:169137399:G:A, 2:169137399:G:C, 2:169137403:G:A, 2:169137411:T:C, 2:169137424:C:A, 2:169137439:T:C, 2:169137442:G:A, 2:169137450:A:T, 2:169137453:A:T, 2:169137459:G:T, 2:169137463:G:C, 2:169137469:C:A, 2:169137469:C:T, 2:169137475:C:T, 2:169137476:C:T, 2:169137489:T:C, 2:169137493:T:A, 2:169138576:C:T, 2:169138582:C:G, 2:169138584:A:G, 2:169138624:C:T, 2:169138624:C:G, 2:169138630:T:C, 2:169138653:G:A, 2:169138660:A:C, 2:169138665:A:G, 2:169138666:C:A, 2:169138681:C:T, 2:169138688:C:G, 2:169138693:C:A, 2:169138696:G:C, 2:169138698:C:T, 2:169138701:C:G, 2:169138702:T:C, 2:169138705:A:T, 2:169139249:A:T, 2:169139251:C:T, 2:169139255:G:A, 2:169139260:T:C, 2:169139263:G:A, 2:169139269:G:A, 2:169139281:G:A, 2:169139285:C:T, 2:169139290:C:G, 2:169139299:T:C, 2:169139318:C:A, 2:169139326:C:G, 2:169139327:C:T, 2:169139329:A:G, 2:169139332:A:T, 2:169139371:G:C, 2:169139538:CTTACTTG:C, 2:169139543:T:C, 2:169139548:C:T, 2:169139573:C:T, 2:169139587:T:A, 2:169139591:C:T, 2:169139597:A:T, 2:169139609:A:G, 2:169140456:T:C, 2:169140461:T:G, 2:169140461:T:C, 2:169140468:G:C, 2:169140474:T:G, 2:169140475:C:A, 2:169140476:T:C, 2:169140479:T:A, 2:169140485:T:C, 2:169140489:A:T, 2:169140499:G:T, 2:169140503:A:T, 2:169140503:A:C, 2:169140513:A:AT, 2:169140513:A:T, 2:169140515:G:T, 2:169140516:G:T, 2:169140521:G:C, 2:169140521:G:T, 2:169140522:G:A, 2:169140525:G:C, 2:169140533:G:A, 2:169140539:T:C, 2:169140540:C:T, 2:169140545:G:C, 2:169142679:T:A, 2:169142683:A:C, 2:169142715:C:T, 2:169142727:G:T, 2:169142729:A:T, 2:169142735:G:T, 2:169142743:C:T, 2:169142757:CAG:C, 2:169142772:A:T, 2:169142778:T:C, 2:169142779:T:C, 2:169142781:C:T, 2:169142784:AG:A, 2:169142785:G:A, 2:169142786:G:T, 2:169142787:T:C, 2:169142790:G:A, 2:169142793:A:G, 2:169145755:T:A, 2:169145758:T:C, 2:169145759:A:G, 2:169145760:T:G, 2:169145779:C:T, 2:169145780:G:A, 2:169145786:G:C, 2:169145812:G:T, 2:169145829:T:A, 2:169145851:C:T, 2:169145855:C:T, 2:169145861:C:T, 2:169145863:T:G, 2:169145872:G:T, 2:169145876:T:C, 2:169145888:G:T, 2:169145890:T:C, 2:169145908:C:T, 2:169145914:G:C, 2:169145915:G:T, 2:169146737:A:C, 2:169146739:C:T, 2:169146741:T:A, 2:169146741:T:C, 2:169146742:C:T, 2:169146750:A:G, 2:169146774:T:C, 2:169146777:T:G, 2:169146790:T:C, 2:169146796:C:T, 2:169146808:C:T, 2:169146819:A:C, 2:169146819:A:G, 2:169146822:C:T, 2:169146823:G:A, 2:169146838:A:G, 2:169146843:A:G, 2:169146852:C:G, 2:169146855:G:A, 2:169146869:G:C, 2:169146871:C:T, 2:169146891:C:T, 2:169146891:C:A, 2:169146892:G:A, 2:169146892:G:T, 2:169146897:T:C, 2:169146905:C:T, 2:169146915:G:A, 2:169146919:C:G, 2:169146937:C:G, 2:169146938:C:G, 2:169146945:G:A, 2:169146952:A:T, 2:169150898:C:G, 2:169150920:T:C, 2:169150923:C:T, 2:169150925:G:A, 2:169150937:A:G, 2:169150941:C:T, 2:169150967:C:T, 2:169150976:A:G, 2:169150977:G:C, 2:169150982:G:A, 2:169150983:C:A, 2:169150986:C:A, 2:169150986:C:G, 2:169150988:T:G, 2:169152798:C:A, 2:169152800:T:C, 2:169152805:A:G, 2:169152835:A:C, 2:169152838:A:G, 2:169152839:C:A, 2:169152845:T:G, 2:169152855:G:T, 2:169152901:A:T, 2:169152902:T:C, 2:169152917:T:G, 2:169152923:C:A, 2:169152944:G:A, 2:169154466:C:T, 2:169154487:C:A, 2:169154501:T:C, 2:169154511:C:CAA, 2:169154511:C:G, 2:169154513:TC:T, 2:169154514:C:T, 2:169154516:T:A, 2:169154517:C:G, 2:169154529:C:G, 2:169154533:GA:G, 2:169154534:A:T, 2:169154536:C:A, 2:169154550:G:C, 2:169154562:G:A, 2:169154565:T:A, 2:169154568:G:A, 2:169154572:A:C, 2:169154592:A:C, 2:169154603:C:T, 2:169156277:C:G, 2:169156279:G:A, 2:169156288:C:T, 2:169156295:C:A, 2:169156301:G:A, 2:169156315:G:A, 2:169156325:C:G, 2:169156325:C:A, 2:169156331:A:T, 2:169156351:T:C, 2:169156354:G:T, 2:169156372:G:C, 2:169156384:A:T, 2:169156395:T:G, 2:169156396:T:A, 2:169156402:A:G, 2:169156405:T:C, 2:169157376:C:T, 2:169157379:G:C, 2:169157380:A:T, 2:169157385:C:A, 2:169157416:T:C, 2:169157424:C:G, 2:169157426:GATAA:G, 2:169157431:A:T, 2:169157433:C:T, 2:169157434:C:CGTGG, 2:169157437:C:T, 2:169157449:G:T, 2:169157461:G:C, 2:169157464:C:G, 2:169157464:C:T, 2:169157465:G:C, 2:169157482:A:G, 2:169157487:C:G, 2:169157491:C:A, 2:169157496:C:T, 2:169157502:T:C, 2:169162480:A:T, 2:169162487:C:T, 2:169162508:C:A, 2:169162516:T:A, 2:169162522:A:T, 2:169162532:G:A, 2:169162538:T:G, 2:169162550:T:A, 2:169162552:C:T, 2:169162552:C:A, 2:169162562:A:G, 2:169162570:T:A, 2:169162573:G:A, 2:169162588:G:T, 2:169162589:T:C, 2:169162589:T:A, 2:169162592:GT:G, 2:169162592:G:A, 2:169165938:C:T, 2:169165947:C:T, 2:169165952:G:T, 2:169165953:T:G, 2:169165956:C:T, 2:169165958:T:C, 2:169165961:C:T, 2:169165964:C:T, 2:169165965:A:C, 2:169165968:C:T, 2:169165977:C:A, 2:169165988:T:C, 2:169165990:A:C, 2:169165997:T:C, 2:169166001:T:G, 2:169166001:T:C, 2:169166003:CA:C, 2:169166006:C:A, 2:169166007:G:T, 2:169166010:T:C, 2:169166012:T:C, 2:169166024:A:T, 2:169166028:G:A, 2:169166028:G:T, 2:169166045:G:A, 2:169168546:G:C, 2:169168547:T:C, 2:169168572:C:T, 2:169168610:A:C, 2:169168611:T:C, 2:169168619:T:C, 2:169168621:G:T, 2:169168626:T:G, 2:169168629:A:T, 2:169168633:GA:G, 2:169168652:T:C, 2:169168662:C:G, 2:169168671:G:T, 2:169168673:G:A, 2:169168674:T:G, 2:169169701:C:T, 2:169169701:C:G, 2:169169726:CCAAA:C, 2:169169728:A:G, 2:169169732:A:G, 2:169169760:AC:A, 2:169169780:T:G, 2:169169782:G:A, 2:169169794:T:C, 2:169169801:G:A, 2:169169809:G:A, 2:169169812:C:T, 2:169170552:A:C, 2:169170553:C:T, 2:169170556:T:C, 2:169170559:C:A, 2:169170568:G:A, 2:169170574:T:C, 2:169170583:T:A, 2:169170584:C:T, 2:169170585:G:T, 2:169170617:T:G, 2:169170628:T:C, 2:169170646:C:T, 2:169172011:TCA:T, 2:169172035:T:A, 2:169172038:T:A, 2:169172045:A:C, 2:169172059:T:G, 2:169172060:C:T, 2:169172063:A:G, 2:169172069:A:G, 2:169172075:G:T, 2:169172075:G:C, 2:169172077:G:A, 2:169172087:G:A, 2:169172107:T:G, 2:169172107:T:A, 2:169172110:C:G, 2:169172114:C:T, 2:169172116:G:A, 2:169172121:G:T, 2:169172122:C:A, 2:169172134:T:C, 2:169173105:G:C, 2:169173114:T:G, 2:169173116:T:C, 2:169173120:C:T, 2:169173129:C:T, 2:169173131:T:C, 2:169173137:C:A, 2:169173137:C:T, 2:169173137:C:G, 2:169173138:C:T, 2:169173141:T:G, 2:169173143:C:T, 2:169173152:C:T, 2:169173167:C:A, 2:169173173:T:C, 2:169173177:T:C, 2:169173186:T:G, 2:169173194:G:A, 2:169173199:G:T, 2:169173200:T:C, 2:169173206:C:T, 2:169173210:G:C, 2:169173212:T:C, 2:169173215:G:A, 2:169173930:A:T, 2:169173940:C:A, 2:169173954:C:A, 2:169173958:C:T, 2:169173961:T:C, 2:169173964:C:A, 2:169173971:A:C, 2:169173972:C:T, 2:169173974:C:A, 2:169173975:T:G, 2:169173977:C:A, 2:169173978:C:T, 2:169173984:T:C, 2:169173985:G:T, 2:169173997:G:T, 2:169173997:G:A, 2:169174005:G:A, 2:169174013:A:T, 2:169174014:A:T, 2:169174020:C:A, 2:169174029:C:T, 2:169174037:G:T, 2:169174041:G:T, 2:169174045:A:G, 2:169174046:G:T, 2:169174047:T:C, 2:169174065:G:A, 2:169174076:AC:A, 2:169174081:C:G, 2:169174084:T:G, 2:169174087:A:T, 2:169174097:C:A, 2:169174099:G:C, 2:169174099:G:T, 2:169174104:G:A, 2:169174110:G:A, 2:169174112:G:C, 2:169174132:A:G, 2:169174141:C:T, 2:169174157:G:T, 2:169174158:T:G, 2:169174162:TC:T, 2:169175192:C:A, 2:169175201:A:C, 2:169175217:A:T, 2:169175219:C:A, 2:169175243:T:C, 2:169175247:A:T, 2:169175258:G:T, 2:169175274:C:T, 2:169175277:C:T, 2:169175283:A:T, 2:169175294:C:A, 2:169175294:C:T, 2:169175310:G:C, 2:169175310:G:T, 2:169175316:G:A, 2:169175322:G:A, 2:169175330:T:C, 2:169175331:C:G, 2:169175333:T:C, 2:169175342:T:A, 2:169175355:T:C, 2:169175366:C:T, 2:169175368:T:A, 2:169175374:C:A, 2:169175374:C:G, 2:169175379:T:C, 2:169175385:T:C, 2:169176411:T:C, 2:169176417:T:C, 2:169176424:C:A, 2:169176435:T:G, 2:169176438:G:A, 2:169176441:C:G, 2:169176444:G:T, 2:169176447:C:T, 2:169176449:C:A, 2:169176450:A:G, 2:169176451:T:C, 2:169176453:G:A, 2:169176454:G:T, 2:169176459:C:G, 2:169176465:G:A, 2:169176477:A:G, 2:169176497:A:C, 2:169176502:G:A, 2:169176511:A:T, 2:169176514:T:C, 2:169176516:A:C, 2:169176533:C:G, 2:169176538:T:G, 2:169176544:A:G, 2:169176550:G:A, 2:169176552:G:C, 2:169176564:T:C, 2:169176573:C:T, 2:169176577:A:G, 2:169176582:T:C, 2:169176588:A:G, 2:169177802:C:A, 2:169177808:G:C, 2:169177811:TG:T, 2:169177814:C:T, 2:169177826:T:C, 2:169177827:A:G, 2:169177832:T:A, 2:169177841:A:T, 2:169177844:G:T, 2:169177846:T:G, 2:169177866:GTGTC:G, 2:169177887:C:T, 2:169177889:T:C, 2:169177890:ATT:A, 2:169177890:A:G, 2:169177901:T:G, 2:169177907:A:G, 2:169177922:C:T, 2:169177934:T:A, 2:169177934:T:TA, 2:169177940:G:A, 2:169177953:T:C, 2:169177962:C:A, 2:169177985:T:C, 2:169177986:C:CG, 2:169177986:C:T, 2:169177988:T:A, 2:169177998:G:A, 2:169178000:C:T, 2:169178001:G:A, 2:169178019:C:T, 2:169181448:T:C, 2:169181451:A:T, 2:169181455:A:G, 2:169181457:C:T, 2:169181462:G:C, 2:169181492:GGT:G, 2:169181505:G:T, 2:169181509:T:A, 2:169181511:C:T, 2:169181514:T:C, 2:169181523:T:C, 2:169181533:T:C, 2:169181541:A:G, 2:169181552:G:C, 2:169181566:T:C, 2:169181569:C:T, 2:169181569:C:A, 2:169181572:C:G, 2:169181574:C:T, 2:169181577:C:G, 2:169181581:T:G, 2:169181596:C:T, 2:169181604:G:T, 2:169181606:C:G, 2:169181615:G:T, 2:169181616:T:C, 2:169182177:G:A, 2:169182180:G:A, 2:169182183:G:C, 2:169182198:G:T, 2:169182198:G:A, 2:169182204:C:G, 2:169182218:T:G, 2:169182227:T:C, 2:169182231:C:T, 2:169182233:C:G, 2:169182233:C:T, 2:169182282:A:T, 2:169182285:G:A, 2:169182290:T:C, 2:169182291:C:A, 2:169182293:A:C, 2:169182299:G:A, 2:169185509:A:G, 2:169185510:C:T, 2:169185519:C:T, 2:169185522:C:A, 2:169185524:A:C, 2:169185531:C:T, 2:169185543:G:T, 2:169185555:T:C, 2:169185558:T:C, 2:169185560:G:T, 2:169185574:C:A, 2:169185578:T:C, 2:169185586:C:T, 2:169185586:C:G, 2:169185588:T:G, 2:169185605:C:T, 2:169185611:G:T, 2:169185614:T:C, 2:169185615:C:T, 2:169185618:TC:T, 2:169185623:T:C, 2:169185629:C:T, 2:169185630:T:C, 2:169185639:C:T, 2:169185641:C:A, 2:169185642:G:C, 2:169185647:A:G, 2:169185649:A:C, 2:169185653:A:G, 2:169185654:A:C, 2:169185657:C:A, 2:169185704:T:C, 2:169185732:G:A, 2:169185737:C:T, 2:169185744:T:C, 2:169185753:G:T, 2:169185758:A:G, 2:169185761:T:A, 2:169185793:T:A, 2:169185797:C:G, 2:169185808:TG:T, 2:169185812:G:T, 2:169185819:T:G, 2:169185825:T:A, 2:169185827:T:C, 2:169185830:G:C, 2:169185830:G:A, 2:169185831:A:G, 2:169185833:C:T, 2:169185840:C:T, 2:169185841:A:C, 2:169185846:C:T, 2:169185850:C:G, 2:169185851:T:A, 2:169185852:T:C, 2:169185864:C:G, 2:169185864:C:T, 2:169185870:G:A, 2:169185872:A:T, 2:169185882:A:G, 2:169185888:C:CAATA, 2:169185893:T:C, 2:169185897:C:T, 2:169185900:A:C, 2:169185910:G:C, 2:169185914:G:A, 2:169185929:C:A, 2:169185932:G:T, 2:169185936:G:A, 2:169185958:T:G, 2:169185964:G:T, 2:169185966:C:T, 2:169185968:G:C, 2:169185974:T:A, 2:169185976:G:C, 2:169185980:T:C, 2:169185992:A:G, 2:169185993:T:C, 2:169185995:G:A, 2:169186014:T:C, 2:169187969:C:T, 2:169187972:C:T, 2:169187984:T:G, 2:169187985:C:T, 2:169187986:G:C, 2:169187991:T:C, 2:169188006:C:T, 2:169188013:G:C, 2:169188032:T:C, 2:169188033:C:A, 2:169188034:G:C, 2:169188051:C:T, 2:169188055:C:G, 2:169188060:A:G, 2:169188063:C:T, 2:169188066:G:C, 2:169188072:G:A, 2:169188077:G:T, 2:169188077:G:C, 2:169188080:G:A, 2:169188087:G:A, 2:169188099:G:T, 2:169188100:G:T, 2:169188101:T:G, 2:169188102:G:A, 2:169188108:G:C, 2:169188114:C:T, 2:169188133:A:T, 2:169188137:T:A, 2:169188150:C:A, 2:169188151:G:T, 2:169188173:C:T, 2:169188179:T:C, 2:169188185:G:T, 2:169188191:T:C, 2:169188192:G:T, 2:169188203:C:T, 2:169188204:A:C, 2:169188206:G:C, 2:169188218:C:G, 2:169188219:A:C, 2:169188222:C:G, 2:169188223:C:A, 2:169188224:C:T, 2:169188229:G:C, 2:169188236:T:G, 2:169188236:T:C, 2:169188239:T:G, 2:169188245:C:G, 2:169188245:C:T, 2:169191848:T:C, 2:169191848:T:G, 2:169191859:T:C, 2:169191860:A:C, 2:169191865:C:T, 2:169191866:A:G, 2:169191869:T:C, 2:169191872:A:G, 2:169191873:T:A, 2:169191876:A:T, 2:169191883:G:A, 2:169191893:T:C, 2:169191896:T:C, 2:169191901:C:A, 2:169191906:C:A, 2:169191911:T:C, 2:169191916:T:A, 2:169191917:C:A, 2:169191919:T:C, 2:169191935:C:G, 2:169191938:C:T, 2:169191959:A:G, 2:169191960:C:G, 2:169191968:T:C, 2:169191985:G:A, 2:169191986:G:A, 2:169192008:C:G, 2:169192022:A:G, 2:169192023:G:C, 2:169193778:T:C, 2:169193791:T:A, 2:169193808:T:A, 2:169193817:C:T, 2:169193822:C:T, 2:169193834:G:C, 2:169193854:A:G, 2:169193855:C:G, 2:169193881:G:A, 2:169196916:G:C, 2:169196919:G:C, 2:169196920:C:T, 2:169196934:G:T, 2:169196936:A:C, 2:169196938:C:A, 2:169196953:C:G, 2:169196958:T:C, 2:169196961:C:T, 2:169196969:A:T, 2:169197015:C:T, 2:169198794:G:A, 2:169198797:G:C, 2:169198799:G:T, 2:169198804:C:A, 2:169198810:T:C, 2:169198813:T:G, 2:169198816:C:G, 2:169198816:C:T, 2:169198818:C:G, 2:169198825:C:T, 2:169198828:T:C, 2:169198830:T:A, 2:169198833:C:T, 2:169198834:C:T, 2:169198846:A:G, 2:169198846:A:T, 2:169198851:C:A, 2:169198856:A:C, 2:169198857:A:G, 2:169198860:C:T, 2:169198862:A:C, 2:169198865:A:T, 2:169198873:T:A, 2:169198878:C:A, 2:169198905:C:A, 2:169198912:C:A, 2:169201641:A:C, 2:169201654:T:G, 2:169201654:T:C, 2:169201669:T:A, 2:169201675:C:G, 2:169201676:C:T, 2:169201679:T:C, 2:169201693:C:T, 2:169201696:G:A, 2:169201705:C:T, 2:169201714:T:C, 2:169201729:G:A, 2:169201739:T:G, 2:169201761:T:TG, 2:169201766:C:T, 2:169201774:C:CATTGTAGT, 2:169201775:C:A, 2:169201779:AC:A, 2:169201794:G:C, 2:169201795:T:C, 2:169201804:C:T, 2:169201810:G:C, 2:169201813:T:A, 2:169201822:C:T, 2:169201826:G:A, 2:169201828:C:A, 2:169201832:T:C, 2:169201844:A:T, 2:169201850:T:C, 2:169201861:G:C, 2:169202755:C:T, 2:169202767:T:A, 2:169202776:T:C, 2:169202796:G:T, 2:169202807:C:A, 2:169202812:T:A, 2:169202816:A:G, 2:169202824:G:C, 2:169202826:G:C, 2:169202827:A:C, 2:169202869:C:A, 2:169202870:G:A, 2:169202888:T:C, 2:169202889:G:T, 2:169202890:C:T, 2:169202895:C:G, 2:169202905:T:C, 2:169202908:G:A, 2:169202909:C:T, 2:169202914:T:C, 2:169202918:A:G, 2:169202956:G:A, 2:169203984:G:A, 2:169203994:T:C, 2:169204011:T:A, 2:169204011:T:C, 2:169204017:T:C, 2:169204022:A:C, 2:169204033:T:A, 2:169204038:T:C, 2:169204039:G:C, 2:169204052:C:A, 2:169204093:T:A, 2:169204105:C:T, 2:169204110:T:C, 2:169204116:G:C, 2:169204119:C:T, 2:169204120:C:T, 2:169204123:C:T, 2:169204123:CAT:C, 2:169204128:T:A, 2:169204138:G:A, 2:169204146:C:A, 2:169204158:A:G, 2:169204162:C:T, 2:169204176:T:C, 2:169204182:C:T, 2:169204183:C:T, 2:169204191:G:C, 2:169204192:T:A, 2:169204207:G:C, 2:169204207:G:GGA, 2:169204215:G:A, 2:169204224:A:G, 2:169204242:C:A, 2:169204257:C:T, 2:169204261:C:G, 2:169205486:C:T, 2:169205492:C:G, 2:169205510:C:T, 2:169205515:T:C, 2:169205518:T:C, 2:169205522:G:T, 2:169205534:TG:T, 2:169205593:C:T, 2:169205597:C:T, 2:169205600:T:C, 2:169205635:T:G, 2:169205638:C:T, 2:169206022:C:T, 2:169206032:G:A, 2:169206035:T:A, 2:169206065:C:CG, 2:169206066:G:T, 2:169206072:T:C, 2:169206078:T:G, 2:169206080:C:A, 2:169206086:G:C, 2:169206089:C:A, 2:169206092:T:A, 2:169206102:T:C, 2:169206114:T:G, 2:169206135:A:G, 2:169206143:C:A, 2:169206147:T:C, 2:169206154:C:A, 2:169206156:A:T, 2:169206164:G:A, 2:169206171:C:A, 2:169206174:C:T, 2:169206333:A:C, 2:169206372:T:C, 2:169206389:C:T, 2:169206398:G:A, 2:169206410:T:A, 2:169206414:T:A, 2:169206420:A:G, 2:169206441:C:T, 2:169206443:T:G, 2:169206446:T:C, 2:169206450:G:T, 2:169206464:C:G, 2:169206479:G:A, 2:169206485:A:C, 2:169206486:A:C, 2:169206488:G:A, 2:169206506:G:C, 2:169206518:A:G, 2:169206522:T:C, 2:169206552:G:A, 2:169206563:G:A, 2:169206575:C:G, 2:169206587:T:C, 2:169206588:C:T, 2:169206590:C:A, 2:169206591:T:A, 2:169206592:T:G, 2:169206596:AG:A, 2:169206597:G:T, 2:169206602:C:T, 2:169206605:A:C, 2:169206608:G:A, 2:169206617:C:T, 2:169206619:T:G, 2:169206624:G:A, 2:169206651:A:G, 2:169206653:A:G, 2:169206657:G:A, 2:169206671:T:C, 2:169206686:G:A, 2:169206690:T:C, 2:169206692:T:C, 2:169206698:A:G, 2:169206713:C:G, 2:169206716:G:T, 2:169206730:G:T, 2:169206734:A:C, 2:169206738:T:C, 2:169206740:G:A, 2:169206743:A:C, 2:169206744:C:G, 2:169206754:C:A, 2:169206757:G:T, 2:169206766:G:C, 2:169206774:T:C, 2:169206774:T:A, 2:169206777:C:T, 2:169206786:G:A, 2:169206789:C:T, 2:169206793:G:T, 2:169206807:T:C, 2:169206809:C:A, 2:169206812:G:C, 2:169206813:C:T, 2:169206821:A:T, 2:169206823:C:A, 2:169206824:T:G, 2:169206828:T:C, 2:169206844:C:T, 2:169206878:T:C, 2:169206882:G:A, 2:169206888:G:A, 2:169206893:C:A, 2:169206894:G:A, 2:169206896:C:T, 2:169206905:C:A, 2:169206906:G:T, 2:169206908:A:C, 2:169206909:T:A, 2:169206913:T:A, 2:169206954:C:T, 2:169206960:A:G, 2:169206961:A:C, 2:169206970:C:A, 2:169206972:A:G, 2:169206980:T:C, 2:169206980:T:A, 2:169206983:C:T, 2:169206983:C:A, 2:169207011:G:C, 2:169207011:G:A, 2:169207016:G:A, 2:169207025:C:T, 2:169207032:A:C, 2:169207043:G:A, 2:169207046:C:A, 2:169207047:G:A, 2:169207064:A:C, 2:169207094:T:C, 2:169207094:T:G, 2:169207110:G:A, 2:169207121:T:C, 2:169207125:G:A, 2:169207145:G:A, 2:169207147:C:T, 2:169207163:T:A, 2:169207164:T:G, 2:169207176:G:T, 2:169207181:T:C, 2:169207185:T:C, 2:169207188:T:G, 2:169207203:C:T, 2:169207208:A:G, 2:169207218:C:T, 2:169207220:G:A, 2:169207227:A:G, 2:169207232:T:C, 2:169207246:A:T, 2:169209451:A:G, 2:169209456:C:A, 2:169209458:A:G, 2:169209459:C:T, 2:169209462:A:C, 2:169209472:A:C, 2:169209473:A:C, 2:169209473:A:G, 2:169209476:C:T, 2:169209477:C:A, 2:169209479:C:T, 2:169209480:G:A, 2:169209485:C:G, 2:169209494:C:T, 2:169209497:A:G, 2:169209501:C:T, 2:169209515:T:C, 2:169209516:T:A, 2:169209527:G:T, 2:169209532:ATCTG:A, 2:169209533:T:C, 2:169209537:G:T, 2:169209545:C:G, 2:169209546:T:C, 2:169209549:G:C, 2:169209554:G:A, 2:169209554:G:C, 2:169209555:C:T, 2:169209563:G:T, 2:169209578:C:T, 2:169209591:A:G, 2:169209602:C:G, 2:169209605:G:A, 2:169209606:A:T, 2:169209614:T:C, 2:169209615:C:A, 2:169209620:T:A, 2:169209620:T:C, 2:169209623:A:G, 2:169209626:T:G, 2:169209629:A:G, 2:169209632:G:A, 2:169209633:C:G, 2:169209633:C:T, 2:169209635:T:C, 2:169211966:A:G, 2:169211968:C:A, 2:169211970:T:C, 2:169211974:C:T, 2:169211977:C:T, 2:169211979:A:G, 2:169211982:G:A, 2:169211988:A:G, 2:169211991:G:T, 2:169212018:C:A, 2:169212022:A:G, 2:169212025:C:T, 2:169212043:T:C, 2:169212045:G:A, 2:169212057:A:T, 2:169212079:A:T, 2:169212081:C:T, 2:169212085:T:C, 2:169212094:T:C, 2:169212096:A:C, 2:169212097:G:C, 2:169212100:T:G, 2:169212114:C:G, 2:169212115:A:T, 2:169212118:C:A, 2:169212118:C:G, 2:169212132:C:A, 2:169212132:C:CCAAAAGCATT, 2:169212133:C:T, 2:169212136:C:T, 2:169212165:G:C, 2:169212169:T:G, 2:169212178:T:A, 2:169212180:C:G, 2:169212183:C:G, 2:169212184:A:C, 2:169212186:C:T, 2:169212202:C:A, 2:169213657:T:C, 2:169213669:A:G, 2:169213680:C:G, 2:169213692:G:C, 2:169213711:C:G, 2:169213718:G:C, 2:169213722:G:A, 2:169213725:C:T, 2:169213729:T:C, 2:169213735:T:C, 2:169213735:T:A, 2:169213737:T:A, 2:169213749:A:G, 2:169213750:T:C, 2:169213753:C:T, 2:169213768:C:T, 2:169213781:G:T, 2:169213783:A:G, 2:169213785:G:A, 2:169213791:T:C, 2:169213798:C:A, 2:169213813:G:A, 2:169213833:A:T, 2:169213840:G:A, 2:169213851:T:A, 2:169213851:T:C, 2:169213863:C:T, 2:169213870:T:C, 2:169216252:C:G, 2:169216267:T:C, 2:169216273:C:T, 2:169216291:C:T, 2:169216296:A:T, 2:169216305:G:A, 2:169216311:C:T, 2:169216320:T:A, 2:169216324:C:T, 2:169216327:G:A, 2:169216328:G:C, 2:169216329:T:C, 2:169216335:G:A, 2:169216356:G:T, 2:169216360:CA:C, 2:169216365:A:C, 2:169216371:G:C, 2:169216375:T:C, 2:169216390:G:A, 2:169216395:C:A, 2:169216411:G:A, 2:169216428:T:G, 2:169220455:C:G, 2:169220455:C:T, 2:169220457:C:G, 2:169220461:C:T, 2:169220467:C:T, 2:169220470:C:T, 2:169220474:T:C, 2:169220478:C:A, 2:169220490:C:G, 2:169220491:C:T, 2:169220505:G:T, 2:169220508:C:T, 2:169220512:C:G, 2:169220514:T:C, 2:169220522:C:G, 2:169220547:C:T, 2:169220548:C:T, 2:169220551:G:A, 2:169220557:T:A, 2:169220558:C:G, 2:169225312:C:T, 2:169225315:T:C, 2:169225324:T:C, 2:169225332:T:C, 2:169225338:G:C, 2:169225356:A:C, 2:169225357:T:A, 2:169225365:A:G, 2:169225368:G:A, 2:169225380:G:A, 2:169225405:C:T, 2:169225405:C:A, 2:169225413:G:A, 2:169225413:G:T, 2:169225420:T:A, 2:169225428:T:A, 2:169225440:C:T, 2:169225450:C:T, 2:169226424:G:A, 2:169226424:G:T, 2:169226424:G:C, 2:169226434:C:T, 2:169226436:A:G, 2:169226437:AT:A, 2:169226441:A:G, 2:169226446:T:G, 2:169226447:T:C, 2:169226456:T:G, 2:169226472:C:T, 2:169226495:A:C, 2:169226498:G:A, 2:169226499:G:A, 2:169226503:C:T, 2:169226505:T:C, 2:169226507:G:A, 2:169226510:T:A, 2:169226510:T:C, 2:169226520:T:G, 2:169226549:A:G, 2:169226552:A:G, 2:169226563:TAC:T, 2:169226571:T:C, 2:169226579:G:A, 2:169226580:G:C, 2:169226588:T:C, 2:169231715:T:A, 2:169231716:C:T, 2:169231728:A:G, 2:169231734:T:C, 2:169231735:C:A, 2:169231743:A:G, 2:169231804:A:C, 2:169231811:G:C, 2:169233416:G:T, 2:169233431:T:A, 2:169233435:C:A, 2:169233438:C:T, 2:169233455:C:A, 2:169233464:T:C, 2:169233470:A:G, 2:169233483:G:C, 2:169233483:G:T, 2:169233493:A:T, 2:169233496:C:A, 2:169233499:C:G, 2:169233510:G:C, 2:169233516:C:T, 2:169233518:C:G, 2:169233524:G:A, 2:169233525:T:C, 2:169233530:C:G, 2:169233537:T:C, 2:169233542:T:G, 2:169233545:A:C, 2:169233557:A:C, 2:169233569:G:A, 2:169233570:C:T, 2:169233577:G:T, 2:169233578:T:C, 2:169233581:C:A, 2:169235839:C:A, 2:169235848:T:G, 2:169235848:T:C, 2:169235850:G:T, 2:169235851:C:T, 2:169235867:A:C, 2:169235868:T:A, 2:169235868:T:C, 2:169235877:T:C, 2:169235884:C:T, 2:169235896:T:C, 2:169235898:T:A, 2:169235913:T:C, 2:169235918:G:C, 2:169235929:G:T, 2:169235934:T:C, 2:169235937:G:A, 2:169235942:G:C, 2:169235949:G:A, 2:169235972:C:A, 2:169235974:T:C, 2:169235982:A:C, 2:169235986:T:TG, 2:169235991:G:A, 2:169235992:T:C, 2:169235995:G:A, 2:169236004:C:T, 2:169236010:T:C, 2:169236012:C:T, 2:169236018:C:T, 2:169236019:G:A, 2:169236023:G:C, 2:169236025:T:C, 2:169236026:G:GC, 2:169236027:C:T, 2:169236031:G:A, 2:169236033:T:G, 2:169236037:G:A, 2:169236040:C:T, 2:169236042:C:T, 2:169236046:C:T, 2:169236049:A:T, 2:169237112:G:C, 2:169237112:G:A, 2:169237113:G:A, 2:169237122:C:T, 2:169237144:G:GT, 2:169237171:G:T, 2:169237178:T:C, 2:169237185:T:G, 2:169237187:G:C, 2:169237199:G:T, 2:169237202:T:C, 2:169237205:A:C, 2:169237208:G:A, 2:169237210:A:C, 2:169237222:G:T, 2:169237229:T:C, 2:169237233:G:C, 2:169237238:A:G, 2:169237251:C:T, 2:169237252:A:C, 2:169237276:ACTGTCAAATAC:A, 2:169237279:G:C, 2:169237283:A:C, 2:169237284:A:G, 2:169238097:T:A, 2:169238098:C:T, 2:169238101:T:A, 2:169238105:T:A, 2:169238124:C:G, 2:169238128:G:T, 2:169238138:G:C, 2:169238159:T:C, 2:169238183:C:G, 2:169238189:C:A, 2:169238218:G:A, 2:169238228:T:C, 2:169238236:T:G, 2:169238248:C:A, 2:169238249:T:G, 2:169238252:C:A, 2:169238258:T:C, 2:169238265:G:T, 2:169238266:T:A, 2:169238267:T:C, 2:169238269:T:G, 2:169238271:A:T, 2:169238273:T:C, 2:169238276:C:T, 2:169238281:A:G, 2:169238290:A:G, 2:169238300:A:T, 2:169239525:A:G, 2:169239529:G:A, 2:169239541:G:C, 2:169239545:T:C, 2:169239551:C:A, 2:169239559:A:G, 2:169239564:G:C, 2:169239569:C:T, 2:169239589:A:G, 2:169239592:G:A, 2:169239592:G:T, 2:169239613:T:C, 2:169239614:G:A, 2:169239625:G:C, 2:169239633:A:C, 2:169239643:T:C, 2:169239645:A:T, 2:169239646:T:C, 2:169239649:A:G, 2:169239661:G:C, 2:169239661:G:T, 2:169239680:G:A, 2:169239681:TA:T, 2:169239682:A:C, 2:169239718:G:C, 2:169239748:C:T, 2:169239750:A:T, 2:169239752:T:C, 2:169239757:T:C, 2:169239758:C:A, 2:169239774:A:C, 2:169240946:A:G, 2:169240956:T:C, 2:169240969:C:T, 2:169240970:T:C, 2:169240973:G:A, 2:169240976:C:A, 2:169240985:T:C, 2:169240991:A:G, 2:169240993:A:C, 2:169241006:C:A, 2:169241009:T:C, 2:169241018:G:A, 2:169241032:C:T, 2:169241032:C:G, 2:169241033:C:T, 2:169241036:C:G, 2:169241038:C:T, 2:169241047:C:T, 2:169241057:C:T, 2:169241062:A:G, 2:169241063:T:C, 2:169241072:C:T, 2:169241072:C:G, 2:169241089:C:A, 2:169241093:T:C, 2:169241096:G:C, 2:169241096:G:A, 2:169241097:A:C, 2:169241107:G:C, 2:169241114:T:C, 2:169241117:G:T, 2:169241126:T:A, 2:169241132:C:A, 2:169241134:C:T, 2:169241137:A:G, 2:169241145:G:T, 2:169241159:G:C, 2:169241195:T:C, 2:169241201:A:G, 2:169241215:G:A, 2:169241221:C:A, 2:169241224:GT:G, 2:169241236:C:G, 2:169241239:G:GCATTGTGC, 2:169241240:C:T, 2:169241257:C:A, 2:169241266:C:A, 2:169241269:T:C, 2:169241276:G:A, 2:169241278:C:T, 2:169241311:C:T, 2:169241331:T:G, 2:169241334:A:T, 2:169241341:T:A, 2:169241348:T:C, 2:169241354:G:T, 2:169241354:G:A, 2:169241357:G:T, 2:169241363:T:C, 2:169242954:A:T, 2:169242962:C:T, 2:169242967:T:C, 2:169242969:A:T, 2:169242970:T:C, 2:169242979:T:C, 2:169242997:C:T, 2:169243000:T:A, 2:169243007:G:A, 2:169243020:A:C, 2:169243033:C:G, 2:169243039:G:A, 2:169243043:A:C, 2:169243045:T:C, 2:169243063:C:T, 2:169243413:C:A, 2:169243416:A:C, 2:169243444:C:T, 2:169243460:AT:A, 2:169243463:G:C, 2:169243469:T:A, 2:169243469:T:C, 2:169243471:C:T, 2:169243473:TC:T, 2:169243474:C:G, 2:169243475:G:A, 2:169243495:T:A, 2:169243502:G:A, 2:169244692:C:T, 2:169244701:T:C, 2:169244732:C:T, 2:169244734:G:A, 2:169244744:C:G, 2:169244761:C:T, 2:169244762:A:G, 2:169244780:T:C, 2:169244788:G:A, 2:169244806:G:T, 2:169244807:G:T, 2:169244807:G:A, 2:169244815:G:A, 2:169244816:T:C, 2:169244839:C:A, 2:169244839:C:T, 2:169244840:C:T, 2:169244843:C:G, 2:169244864:C:T, 2:169244870:G:A, 2:169244878:G:T, 2:169244881:G:C, 2:169244894:C:T, 2:169244905:G:A, 2:169244912:C:T, 2:169244920:G:A, 2:169244920:GA:G, 2:169244926:G:T, 2:169244926:G:C, 2:169244930:T:C, 2:169244930:T:G, 2:169244932:T:G, 2:169246713:C:T, 2:169246714:C:T, 2:169246737:T:C, 2:169246740:T:C, 2:169246758:T:C, 2:169246765:G:C, 2:169246771:A:C, 2:169246780:C:T, 2:169246788:C:A, 2:169246818:C:A, 2:169246830:G:A, 2:169246830:G:C, 2:169246833:G:A, 2:169246848:TC:T, 2:169246849:C:G, 2:169246852:C:G, 2:169246864:AG:A, 2:169246887:C:G, 2:169246889:A:C, 2:169246891:A:C, 2:169246894:G:A, 2:169246896:C:T, 2:169246908:C:T, 2:169246909:G:A, 2:169246912:G:A, 2:169246921:G:A, 2:169246938:T:C, 2:169246939:G:A, 2:169246950:C:T, 2:169246951:C:G, 2:169246959:T:C, 2:169246979:G:T, 2:169246981:T:C, 2:169246986:C:T, 2:169246986:C:A, 2:169247378:C:G, 2:169247398:T:C, 2:169247404:T:C, 2:169247410:T:C, 2:169247413:A:G, 2:169247416:A:G, 2:169247417:T:G, 2:169247428:C:T, 2:169247431:C:T, 2:169247432:T:A, 2:169247434:C:T, 2:169247436:G:C, 2:169247443:G:A, 2:169247444:T:C, 2:169247452:C:T, 2:169247456:C:T, 2:169247474:G:A, 2:169247485:C:G, 2:169247496:G:C, 2:169247498:C:T, 2:169247498:C:A, 2:169247501:T:TA, 2:169247505:A:C, 2:169247507:A:C, 2:169247508:T:A, 2:169256106:C:G, 2:169256108:C:T, 2:169256109:C:T, 2:169256115:T:C, 2:169256121:G:A, 2:169256127:A:G, 2:169256131:A:T, 2:169256138:A:T, 2:169256141:T:C, 2:169256164:T:A, 2:169256165:C:T, 2:169256177:T:C, 2:169256178:C:A, 2:169256186:C:T, 2:169256196:T:C, 2:169256200:A:T, 2:169256206:A:T, 2:169256208:A:G, 2:169256213:T:A, 2:169256217:C:A, 2:169256217:C:T, 2:169256218:C:A, 2:169256220:A:G, 2:169256229:G:A, 2:169256234:G:T, 2:169257127:C:A, 2:169257128:A:C, 2:169257149:G:T, 2:169257154:C:G, 2:169257158:G:A, 2:169257167:T:G, 2:169257175:G:A, 2:169257177:C:A, 2:169257192:G:C, 2:169257200:A:G, 2:169257203:C:T, 2:169257209:T:C, 2:169257220:G:A, 2:169257223:C:G, 2:169257228:C:G, 2:169257232:T:C, 2:169257242:A:G, 2:169257251:T:A, 2:169259024:C:A, 2:169259025:C:A, 2:169259034:G:C, 2:169259049:G:T, 2:169259056:G:T, 2:169259062:T:G, 2:169259064:A:C, 2:169259097:G:C, 2:169259105:C:T, 2:169259107:T:C, 2:169259107:T:G, 2:169259111:A:T, 2:169259115:A:G, 2:169259118:C:T, 2:169259142:T:C, 2:169259146:G:C, 2:169259146:G:T, 2:169259155:A:C, 2:169259160:C:G, 2:169259175:C:T, 2:169259175:C:G, 2:169259182:C:T, 2:169259187:T:G, 2:169259188:C:A, 2:169259190:A:T, 2:169259193:C:G, 2:169259197:T:C, 2:169259203:C:A, 2:169270902:A:G, 2:169270902:A:T, 2:169270902:A:C, 2:169270907:T:C, 2:169270912:T:C, 2:169270917:C:A, 2:169270918:T:G, 2:169270940:T:C, 2:169270946:T:C, 2:169270960:A:G, 2:169270961:T:C, 2:169270973:G:A, 2:169270987:A:G, 2:169270993:A:G, 2:169270994:C:A, 2:169270995:A:T, 2:169270998:G:C, 2:169271000:A:G, 2:169271002:G:A, 2:169271006:G:A, 2:169271012:C:T, 2:169271012:C:G, 2:169271015:A:G, 2:169271018:C:G, 2:169271021:G:C, 2:169271027:T:C, 2:169271029:A:G, 2:169271030:C:T, 2:169271034:T:A, 2:169271044:G:T, 2:169271057:G:A, 2:169271077:T:C, 2:169271086:A:C, 2:169271089:A:G, 2:169272927:C:T, 2:169272950:T:A, 2:169272962:C:A, 2:169272962:C:T, 2:169272970:G:T, 2:169272971:C:T, 2:169272987:C:G, 2:169272997:A:T, 2:169273001:T:C, 2:169273004:G:A, 2:169273005:TTC:T, 2:169273007:C:T, 2:169273020:C:T, 2:169273020:C:A, 2:169273022:C:T, 2:169273028:T:G, 2:169273028:T:A, 2:169273029:G:C, 2:169273032:C:G, 2:169273037:C:A, 2:169273043:T:C, 2:169273046:T:C, 2:169273059:G:A, 2:169273060:A:T, 2:169273061:T:C, 2:169275042:G:T, 2:169275042:G:A, 2:169275044:T:A, 2:169275045:G:A, 2:169275046:T:A, 2:169275051:G:C, 2:169275066:T:C, 2:169275071:C:T, 2:169275079:C:A, 2:169275096:A:G, 2:169275096:A:C, 2:169275098:T:C, 2:169275101:A:C, 2:169275107:G:A, 2:169275108:G:T, 2:169275119:G:C, 2:169275128:T:C, 2:169275131:G:A, 2:169275140:A:G, 2:169275141:C:T, 2:169275143:G:A, 2:169275153:T:C, 2:169275154:C:T, 2:169275158:T:C, 2:169275186:A:T, 2:169275189:T:C, 2:169275194:C:T, 2:169275195:C:T, 2:169275197:A:C, 2:169275201:G:A, 2:169275204:G:A, 2:169275206:G:A, 2:169275215:G:A, 2:169275216:A:C, 2:169275222:C:T, 2:169275234:T:A, 2:169277749:G:C, 2:169277755:C:T, 2:169277760:T:A, 2:169277767:C:T, 2:169277776:T:C, 2:169277778:T:C, 2:169277787:C:T, 2:169277790:G:C, 2:169277791:A:T, 2:169277802:T:C, 2:169277810:C:A, 2:169277822:A:T, 2:169277829:G:A, 2:169277843:C:T, 2:169277847:C:T, 2:169277853:T:C, 2:169277857:T:C, 2:169277863:C:T, 2:169277874:C:T, 2:169277880:C:T, 2:169277888:C:T, 2:169277890:T:C, 2:169277917:C:A, 2:169277925:C:T, 2:169277925:C:G, 2:169277930:C:G, 2:169277934:T:C, 2:169277944:A:G, 2:169277949:T:C, 2:169279378:G:T, 2:169279381:G:A, 2:169279381:G:T, 2:169279385:C:T, 2:169279403:G:C, 2:169279408:C:T, 2:169279420:G:T, 2:169279422:T:C, 2:169279423:A:G, 2:169279429:G:T, 2:169279454:T:G, 2:169279463:C:G, 2:169279464:T:C, 2:169279465:A:C, 2:169279471:T:C, 2:169279481:T:A, 2:169279513:T:C, 2:169279514:C:CCA, 2:169279525:T:C, 2:169279528:T:C, 2:169279529:C:G, 2:169279529:C:T, 2:169279550:T:G, 2:169279553:G:C, 2:169279556:C:T, 2:169279561:T:C, 2:169279564:A:C, 2:169279568:T:G, 2:169279573:C:G, 2:169279573:C:T, 2:169279578:A:C, 2:169279580:T:A, 2:169279580:T:C, 2:169279583:CA:C, 2:169279588:G:T, 2:169279592:A:C, 2:169279595:C:A, 2:169280351:T:C, 2:169280354:T:C, 2:169280360:A:T, 2:169280361:C:A, 2:169280361:C:T, 2:169280364:T:C, 2:169280370:T:C, 2:169280374:A:C, 2:169280378:A:G, 2:169280393:T:C, 2:169280396:T:C, 2:169280414:G:A, 2:169280423:C:G, 2:169280424:G:A, 2:169280427:T:G, 2:169280439:C:T, 2:169280487:G:C, 2:169280493:T:C, 2:169280505:T:A, 2:169280508:A:C, 2:169280510:G:C, 2:169280510:G:T, 2:169280511:C:A, 2:169280517:C:A, 2:169282902:C:A, 2:169282904:C:A, 2:169282906:C:G, 2:169282918:C:A, 2:169282921:C:G, 2:169282922:T:G, 2:169282944:C:T, 2:169282951:G:A, 2:169282953:C:G, 2:169282954:T:G, 2:169282959:C:T, 2:169282961:C:A, 2:169282981:A:G, 2:169282984:T:A, 2:169282994:A:T, 2:169282995:T:C, 2:169282996:CA:C, 2:169282998:A:G, 2:169289025:C:A, 2:169289031:C:G, 2:169289039:G:T, 2:169289043:T:C, 2:169289046:T:A, 2:169289056:T:C, 2:169289070:G:A, 2:169289085:C:T, 2:169289095:G:T, 2:169289119:A:T, 2:169289125:A:T, 2:169289146:C:A, 2:169290861:A:T, 2:169290870:G:C, 2:169290870:G:GT, 2:169290874:T:G, 2:169290878:C:A, 2:169290878:C:G, 2:169290895:T:G, 2:169290904:C:T, 2:169290916:T:G, 2:169290934:C:G, 2:169290935:G:A, 2:169290937:C:A, 2:169290946:G:A, 2:169290964:G:C, 2:169290994:C:A, 2:169292255:C:T, 2:169292255:C:A, 2:169292259:C:T, 2:169292265:C:T, 2:169292266:A:C, 2:169292267:T:G, 2:169292276:T:C, 2:169292282:C:T, 2:169292286:C:T, 2:169292295:C:T, 2:169292298:C:T, 2:169292304:C:A, 2:169292306:C:G, 2:169292310:T:G, 2:169292314:A:T, 2:169292319:T:G, 2:169292319:T:C, 2:169292320:G:T, 2:169292322:A:G, 2:169292327:C:G, 2:169292360:G:T, 2:169292360:G:A, 2:169294147:C:A, 2:169294148:T:C, 2:169294159:TC:T, 2:169294160:C:T, 2:169294162:T:G, 2:169294163:C:T, 2:169294170:G:T, 2:169294178:A:G, 2:169294181:C:T, 2:169294186:T:C, 2:169294198:A:G, 2:169294210:G:A, 2:169294214:T:A, 2:169294217:A:G, 2:169294247:G:A, 2:169294255:ATC:A, 2:169294597:T:TAA, 2:169294601:G:T, 2:169294605:T:A, 2:169294606:T:A, 2:169294615:C:T, 2:169294632:T:C, 2:169294639:T:C, 2:169294649:C:A, 2:169294672:C:T, 2:169294674:C:T, 2:169294677:T:C, 2:169294683:C:A, 2:169294689:A:C, 2:169294690:G:T, 2:169294692:T:A, 2:169294692:T:C, 2:169294693:G:T, 2:169294698:C:T, 2:169294704:G:T, 2:169294705:G:T, 2:169294706:G:T, 2:169294707:T:C, 2:169294708:A:T, 2:169294712:T:A, 2:169307279:A:C, 2:169307279:AC:A, 2:169307285:G:C, 2:169307294:A:C, 2:169307294:A:T, 2:169307303:A:C, 2:169307320:C:T, 2:169307321:G:C, 2:169307323:G:C, 2:169307326:C:A, 2:169307330:C:A, 2:169307356:C:A, 2:169307356:C:T, 2:169307357:A:T, 2:169307372:C:G, 2:169307373:T:A, 2:169307373:T:C, 2:169307379:C:T, 2:169307382:G:C, 2:169307384:G:C, 2:169307388:G:A, 2:169307388:G:T, 2:169307389:T:C, 2:169307394:T:C, 2:169307395:G:T, 2:169307397:G:T, 2:169318760:A:AC, 2:169318761:C:T, 2:169318761:C:G, 2:169318770:T:C, 2:169318804:C:A, 2:169318828:G:T, 2:169318839:C:T, 2:169318843:C:T, 2:169320778:G:T, 2:169320782:C:A, 2:169320783:C:T, 2:169320798:C:A, 2:169320808:G:C, 2:169320853:A:C, 2:169320864:G:T, 2:169320865:A:C, 2:169362326:C:T, 2:169362335:G:A, 2:169362363:G:A, 2:169362372:A:G, 2:169362374:G:C, 2:169362375:C:A, 2:169362378:C:T, 2:169362380:G:T, 2:169362381:C:G, and 2:169362392:C:G (according to the GRCh38/hg38 human genome assembly).

[0257] In some embodiments, the subject's aggregate gene burden of having any one or more LRP2 variant nucleic acid molecules encoding LRP2 predicted loss-of-function polypeptides represents a weighted sum of a plurality of any of the LRP2 variant nucleic acid molecules encoding LRP2 predicted loss-of-function polypeptides. In some embodiments, the aggregate gene burden is calculated using at least about 2, at least about 3, at least about 4, at least about 5, at least about 10, at least about 20, at least about 30, at least about 40, at least about 50, at least about 60, at least about 70, at least about 80, at least about 100, at least about 120, at least about 150, at least about 200, at least about 250, at least about 300, at least about 400, at least about 500, at least about 1,000, at least about 10,000, at least about 100,000, or at least about or more than 1,000,000 genetic variants present in or around (up to 10 Mb) the LRP2 gene where the gene burden is the number of alleles multiplied by the association estimate with kidney disease or related outcome for each allele (e.g., a weighted burden score). This can include any genetic variants, regardless of their genomic annotation, in proximity to the LRP2 gene (up to 10 Mb around the gene) that show a non-zero association with kidney disease-related traits in a genetic association analysis. In some embodiments, when the subject has an aggregate gene burden above a desired threshold score, the subject has a decreased risk of developing a kidney disease. In some embodiments, when the subject has an aggregate gene burden below a desired threshold score, the subject has an increased risk of developing a kidney disease.

[0258] In some embodiments, any of the methods described herein can further comprise determining the subject's aggregate gene burden of having RPL3L variant nucleic acid molecules encoding RPL3L predicted loss-of-function polypeptides associated with a decreased risk of developing a kidney disease. The aggregate gene burden is the sum of all variants in the RPL3L gene, which can be carried out in an association analysis with a kidney disease. In some embodiments, the subject is homozygous for one or more RPL3L variant nucleic acid molecules encoding RPL3L predicted loss-of-function polypeptides associated with a decreased risk of developing a kidney disease. In some embodiments, the subject is heterozygous for one or more RPL3L variant nucleic acid molecules encoding RPL3L predicted loss-of-function polypeptides associated with a decreased risk of developing a kidney disease. The result of the association analysis suggests that RPL3L variant nucleic acid molecules encoding RPL3L predicted loss-of-function polypeptides are associated with decreased risk of developing a kidney disease. When the subject has a lower aggregate gene burden, the subject is at a higher risk of developing a kidney disease and the subject is administered or continued to be administered a therapeutic agent that treats, prevents, or inhibits a kidney disease in an amount that is the same as or less than a standard dosage amount, and/or an RPL3L inhibitor. When the subject has a greater aggregate gene burden, the subject is at a lower risk of developing a kidney disease and the subject is administered or continued to be administered a therapeutic agent that treats, prevents, or inhibits a kidney disease in a standard dosage amount. The greater the aggregate gene burden, the lower the risk of developing a kidney disease.

[0259] RPL3L predicted loss-of-function variants include, but are not limited to: 16:1944844:T:TCTCC, 16:1945498:C:T, 16:1945498:C:A, 16:1945863:G:GT, 16:1945932:T:G, 16:1946629:GGT:G, 16:1946656:TAG:T, 16:1946695:TCC:T, 16:1946696:C:A, 16:1946706:GC:G, 16:1946937:C:A, 16:1946946:TG:T, 16:1946957:C:CG, 16:1947094:GA:G, 16:1947197:T:TG, 16:1947243:CTG:C, 16:1947294:C:T, 16:1947363:GA:G, 16:1952890:G:A, 16:1952950:G:A, 16:1953044:T:C, 16:1953954:AC:A, 16:1954011:CA:C, 16:1954631:T:C, 16:1945932:T:A, 16:1946728:T:G, 16:1946952:C:A, 16:1947100:T:C, 16:1950860:AC:A, 16:1950882:T:A, 16:1950906:G:A, 16:1954150:T:C, 16:1954629:C:A, 16:1944838:T:C, 16:1944846:TC:T, 16:1944850:G:T, 16:1945501:T:TG, 16:1945568:C:CT, 16:1945906:CT:C, 16:1945931:C:T, 16:1946624:C:T, 16:1946655:G:C, 16:1946701:T:TGCGG, 16:1946727:C:T, 16:1947017:C:T, 16:1947082:C:T, 16:1947098:CCT:C, 16:1947193:C:A, 16:1947193:C:T, 16:1947206:G:A, 16:1947212:T:A, 16:1947240:ACT:A, 16:1947272:G:A, 16:1947290:G:A, 16:1947309:G:GGCCACCGT, 16:1947332:G:A, 16:1950842:A:G, 16:1950842:A:C, 16:1950877:G:GTACT, 16:1950880:CT:C, 16:1950951:T:TA, 16:1950980:C:G, 16:1952889:C:CCAGTGATG, 16:1952893:GC:G, 16:1952975:G:GC, 16:1952988:A:AG, 16:1953024:TC:T, 16:1953973:AC:A, 16:1954037:G:A, 16:1954071:GC:G, and 16:1954628:C:T (according to the GRCh38/hg38 human genome assembly).

[0260] RPL3L pLOF or missense variants predicted to be deleterious by 5 out of 5 in silico prediction algorithms with AAF<5% include, but are not limited to: 16:1944844:T:TCTCC, 16:1945498:C:T, 16:1945498:C:A, 16:1945544:G:T, 16:1945563:A:G, 16:1945596:C:T, 16:1945597:G:A, 16:1945609:C:T, 16:1945845:G:A, 16:1945854:C:T, 16:1945855:G:A, 16:1945863:G:GT, 16:1945875:C:A, 16:1945888:T:C, 16:1945896:T:A, 16:1945897:C:T, 16:1945912:C:T, 16:1945912:C:A, 16:1945918:G:A, 16:1945926:C:T, 16:1945932:T:G, 16:1946629:GGT:G, 16:1946630:G:T, 16:1946633:T:C, 16:1946638:G:T, 16:1946647:G:T, 16:1946654:C:T, 16:1946656:TAG:T, 16:1946673:G:T, 16:1946690:C:T, 16:1946690:C:A, 16:1946695:TCC:T, 16:1946696:C:A, 16:1946706:GC:G, 16:1946714:C:T, 16:1946719:C:T, 16:1946724:G:C, 16:1946937:C:A, 16:1946946:TG:T, 16:1946954:G:A, 16:1946957:C:A, 16:1946957:C:CG, 16:1946957:C:T, 16:1946958:G:A, 16:1946962:G:T, 16:1946964:G:T, 16:1946966:T:C, 16:1946985:G:A, 16:1947002:A:G, 16:1947003:C:T, 16:1947006:G:A, 16:1947008:G:T, 16:1947021:C:T, 16:1947023:C:A, 16:1947030:A:G, 16:1947032:G:T, 16:1947035:A:T, 16:1947041:C:T, 16:1947053:T:C, 16:1947062:C:A, 16:1947062:C:T, 16:1947063:G:A, 16:1947065:G:A, 16:1947086:C:A, 16:1947086:C:T, 16:1947087:G:T, 16:1947094:GA:G, 16:1947197:T:TG, 16:1947210:C:G, 16:1947243:CTG:C, 16:1947244:T:C, 16:1947254:C:T, 16:1947263:C:T, 16:1947265:G:A, 16:1947294:C:T, 16:1947316:G:A, 16:1947323:C:T, 16:1947328:A:G, 16:1947329:G:T, 16:1947345:G:T, 16:1947347:G:T, 16:1947349:G:T, 16:1947352:T:G, 16:1947362:G:A, 16:1947363:GA:G, 16:1947367:G:A, 16:1947368:G:T, 16:1950864:G:A, 16:1950865:A:C, 16:1950876:A:G, 16:1950881:T:A, 16:1950921:C:T, 16:1950971:C:G, 16:1950975:T:C, 16:1952885:G:T, 16:1952889:C:T, 16:1952890:G:A, 16:1952892:C:T, 16:1952893:G:A, 16:1952898:C:T, 16:1952904:T:A, 16:1952941:G:A, 16:1952944:G:A, 16:1952950:G:A, 16:1952976:C:G, 16:1952994:G:T, 16:1952995:G:C, 16:1952995:G:A, 16:1952997:G:A, 16:1953015:G:A, 16:1953016:C:T, 16:1953031:G:A, 16:1953044:T:C, 16:1953954:AC:A, 16:1953968:G:A, 16:1953976:T:C, 16:1953980:G:A, 16:1953991:G:A, 16:1954001:C:T, 16:1954010:C:A, 16:1954011:CA:C, 16:1954021:G:A, 16:1954033:G:A, 16:1954048:T:A, 16:1954054:G:A, 16:1954054:G:C, 16:1954076:G:A, 16:1954082:G:A, 16:1954090:C:G, 16:1954118:C:T, 16:1954123:C:T, 16:1954124:G:A, 16:1954136:A:G, 16:1954142:G:A, 16:1954144:T:C, 16:1954631:T:C, 16:1945560:T:A, 16:1945570:T:C, 16:1945570:T:G, 16:1945617:G:A, 16:1945880:C:G, 16:1945881:T:G, 16:1945929:C:T, 16:1945932:T:A, 16:1946626:A:G, 16:1946630:G:A, 16:1946636:T:C, 16:1946641:T:C, 16:1946654:C:A, 16:1946707:C:A, 16:1946720:G:C, 16:1946728:T:G, 16:1946940:T:G, 16:1946952:C:A, 16:1946955:T:C, 16:1946979:C:T, 16:1946984:C:T, 16:1947009:C:G, 16:1947012:G:A, 16:1947014:T:A, 16:1947018:A:T, 16:1947041:C:A, 16:1947042:G:A, 16:1947049:C:A, 16:1947051:T:C, 16:1947074:T:A, 16:1947095:A:G, 16:1947100:T:C, 16:1947202:C:T, 16:1947223:A:G, 16:1947281:G:C, 16:1947313:A:C, 16:1947326:T:C, 16:1947349:G:A, 16:1947357:C:A, 16:1947357:C:G, 16:1950844:C:G, 16:1950860:AC:A, 16:1950882:T:A, 16:1950888:T:C, 16:1950906:G:A, 16:1950911:T:G, 16:1950916:T:G, 16:1950929:T:G, 16:1950949:C:A, 16:1952875:A:G, 16:1952896:G:A, 16:1952949:C:G, 16:1952976:C:T, 16:1952980:C:T, 16:1953987:G:C, 16:1953987:G:T, 16:1954000:G:T, 16:1954000:G:A, 16:1954009:C:A, 16:1954018:G:A, 16:1954021:G:T, 16:1954026:G:C, 16:1954031:C:T, 16:1954150:T:C, 16:1954629:C:A, 16:1944838:T:C, 16:1944846:TC:T, 16:1944850:G:T, 16:1945500:A:G, 16:1945501:T:TG, 16:1945512:T:C, 16:1945516:C:G, 16:1945524:G:C, 16:1945526:C:G, 16:1945530:A:C, 16:1945537:C:T, 16:1945542:C:A, 16:1945543:C:T, 16:1945549:T:C, 16:1945558:T:C, 16:1945568:C:CT, 16:1945596:C:G, 16:1945597:G:T, 16:1945845:G:C, 16:1945866:C:T, 16:1945875:C:T, 16:1945878:C:T, 16:1945887:A:G, 16:1945895:G:C, 16:1945906:CT:C, 16:1945914:T:C, 16:1945927:C:T, 16:1945930:C:T, 16:1945931:C:T, 16:1946624:C:T, 16:1946636:T:G, 16:1946638:G:A, 16:1946655:G:C, 16:1946668:G:A, 16:1946701:T:TGCGG, 16:1946707:C:T, 16:1946719:C:A, 16:1946727:C:T, 16:1946943:T:G, 16:1946943:T:C, 16:1946946:T:G, 16:1946951:T:G, 16:1946961:G:A, 16:1946964:G:C, 16:1946975:T:C, 16:1946982:C:T, 16:1946985:G:C, 16:1946993:G:A, 16:1947003:C:G, 16:1947013:G:T, 16:1947015:G:C, 16:1947016:C:G, 16:1947017:C:T, 16:1947021:C:G, 16:1947026:A:G, 16:1947027:T:A, 16:1947030:A:T, 16:1947032:G:A, 16:1947033:C:G, 16:1947039:T:C, 16:1947041:C:G, 16:1947054:G:A, 16:1947056:G:A, 16:1947082:C:T, 16:1947087:G:A, 16:1947098:CCT:C, 16:1947193:C:T, 16:1947193:C:A, 16:1947206:G:A, 16:1947209:C:T, 16:1947212:T:A, 16:1947217:A:T, 16:1947218:C:A, 16:1947230:C:A, 16:1947240:ACT:A, 16:1947254:C:G, 16:1947272:G:A, 16:1947290:G:A, 16:1947301:A:G, 16:1947303:C:G, 16:1947309:G:GGCCACCGT, 16:1947326:T:G, 16:1947332:G:A, 16:1947334:A:G, 16:1947353:T:C, 16:1947358:T:G, 16:1950842:A:G, 16:1950842:A:C, 16:1950852:G:T, 16:1950867:T:A, 16:1950877:G:GTACT, 16:1950880:CT:C, 16:1950884:T:C, 16:1950885:T:C, 16:1950917:T:A, 16:1950933:G:A, 16:1950936:A:T, 16:1950951:T:C, 16:1950951:T:TA, 16:1950954:T:C, 16:1950972:T:C, 16:1950980:C:G, 16:1952884:A:G, 16:1952889:C:CCAGTGATG, 16:1952893:GC:G, 16:1952893:G:T, 16:1952907:C:T, 16:1952914:G:A, 16:1952917:C:T, 16:1952919:G:A, 16:1952920:C:G, 16:1952929:T:G, 16:1952932:T:C, 16:1952940:C:G, 16:1952955:G:A, 16:1952967:C:A, 16:1952970:A:G, 16:1952971:C:T, 16:1952975:G:GC, 16:1952977:C:T, 16:1952979:A:G, 16:1952988:A:AG, 16:1953000:T:C, 16:1953006:A:G, 16:1953015:G:T, 16:1953018:T:C, 16:1953022:C:T, 16:1953024:TC:T, 16:1953026:C:A, 16:1953030:C:G, 16:1953967:C:G, 16:1953973:AC:A, 16:1953979:C:G, 16:1953988:T:G, 16:1953991:G:T, 16:1953995:T:C, 16:1953997:C:T, 16:1954004:T:C, 16:1954006:T:C, 16:1954010:C:T, 16:1954012:A:T, 16:1954018:G:T, 16:1954024:A:C, 16:1954024:A:G, 16:1954034:G:C, 16:1954034:G:A, 16:1954037:G:A, 16:1954049:C:T, 16:1954055:G:A, 16:1954071:GC:G, 16:1954072:C:T, 16:1954073:C:T, 16:1954087:C:T, 16:1954108:C:T, 16:1954109:C:A, 16:1954123:C:G, 16:1954130:C:T, 16:1954147:G:A, and 16:1954628:C:T (according to the GRCh38/hg38 human genome assembly).

[0261] In some embodiments, the subject's aggregate gene burden of having any one or more RPL3L variant nucleic acid molecules encoding RPL3L predicted loss-of-function polypeptides represents a weighted sum of a plurality of any of the RPL3L variant nucleic acid molecules encoding RPL3L predicted loss-of-function polypeptides. In some embodiments, the aggregate gene burden is calculated using at least about 2, at least about 3, at least about 4, at least about 5, at least about 10, at least about 20, at least about 30, at least about 40, at least about 50, at least about 60, at least about 70, at least about 80, at least about 100, at least about 120, at least about 150, at least about 200, at least about 250, at least about 300, at least about 400, at least about 500, at least about 1,000, at least about 10,000, at least about 100,000, or at least about or more than 1,000,000 genetic variants present in or around (up to 10 Mb) the RPL3L gene where the gene burden is the number of alleles multiplied by the association estimate with kidney disease or related outcome for each allele (e.g., a weighted burden score). This can include any genetic variants, regardless of their genomic annotation, in proximity to the RPL3L gene (up to 10 Mb around the gene) that show a non-zero association with kidney disease-related traits in a genetic association analysis. In some embodiments, when the subject has an aggregate gene burden above a desired threshold score, the subject has a decreased risk of developing a kidney disease. In some embodiments, when the subject has an aggregate gene burden below a desired threshold score, the subject has an increased risk of developing a kidney disease.

[0262] In some embodiments, any of the methods described herein can further comprise determining the subject's aggregate gene burden of having SLC25A45 variant nucleic acid molecules encoding SLC25A45 predicted loss-of-function polypeptides associated with a decreased risk of developing a kidney disease. The aggregate gene burden is the sum of all variants in the SLC25A45 gene, which can be carried out in an association analysis with a kidney disease. In some embodiments, the subject is homozygous for one or more SLC25A45 variant nucleic acid molecules encoding SLC25A45 predicted loss-of-function polypeptides associated with a decreased risk of developing a kidney disease. In some embodiments, the subject is heterozygous for one or more SLC25A45 variant nucleic acid molecules encoding SLC25A45 predicted loss-of-function polypeptides associated with a decreased risk of developing a kidney disease. The result of the association analysis suggests that SLC25A45 variant nucleic acid molecules encoding SLC25A45 predicted loss-of-function polypeptides are associated with decreased risk of developing a kidney disease. When the subject has a lower aggregate gene burden, the subject is at a higher risk of developing a kidney disease and the subject is administered or continued to be administered a therapeutic agent that treats, prevents, or inhibits a kidney disease in an amount that is the same as or less than a standard dosage amount, and/or an SLC25A45 inhibitor. When the subject has a greater aggregate gene burden, the subject is at a lower risk of developing a kidney disease and the subject is administered or continued to be administered a therapeutic agent that treats, prevents, or inhibits a kidney disease in a standard dosage amount. The greater the aggregate gene burden, the lower the risk of developing a kidney disease.

[0263] SLC25A45 pLOF variants include, but are not limited to: 11:65376410:TC:T, 11:65376416:C:T, 11:65376489:AC:A, 11:65376489:A:AC, 11:65376568:GTC:G, 11:65376608:TA:T, 11:65376921:TCG:T, 11:65376923:G:A, 11:65376929:G:GC, 11:65376993:T:TG, 11:65377077:C:A, 11:65379375:C:T, 11:65379384:AC:A, 11:65379394:G:T, 11:65379418:G:T, 11:65379473:AG:A, 11:65379922:TG:T, 11:65379923:G:A, 11:65380176:C:A, 11:65376409:A:T, 11:65376520:G:A, 11:65376830:C:CT, 11:65376918:TC:T, 11:65379374:A:G, 11:65379439:CCG:C, 11:65379866:C:T, 11:65379884:TCTTGACCATGCAATCAA:T, 11:65376433:C:A, 11:65376466:A:AG, 11:65376506:TC:T, 11:65376540:C:CT, 11:65376557:G:C, 11:65376558:T:TA, 11:65376609:A:C, 11:65376676:C:T, 11:65376677:T:C, 11:65376677:T:A, 11:65376815:T:TA, 11:65376817:C:G, 11:65376837:TG:T, 11:65376878:T:TCC, 11:65376887:TG:T, 11:65376910:GC:G, 11:65376912:C:T, 11:65376944:C:A, 11:65377029:G:GT, 11:65377078:T:C, 11:65379373:C:CA, 11:65379374:A:C, 11:65379384:A:AC, 11:65379432:G:A, 11:65379449:TG:T, 11:65379860:CACTCACGG:C, 11:65379866:C:G, 11:65379872:C:A, 11:65379939:C:G, 11:65380130:A:C, and 11:65381950:A:G, 11:65381950:A:T (according to the GRCh38/hg38 human genome assembly).

[0264] SLC25A45 pLOF or missense variants with AAF<5% include, but are not limited to: 11:65376410:TC:T, 11:65376416:C:T, 11:65376420:C:T, 11:65376421:G:A, 11:65376421:G:T, 11:65376433:C:T, 11:65376435:T:G, 11:65376438:C:T, 11:65376460:C:T, 11:65376472:G:T, 11:65376472:G:A, 11:65376489:AC:A, 11:65376489:A:AC, 11:65376493:C:A, 11:65376495:C:T, 11:65376495:C:A, 11:65376496:G:A, 11:65376518:C:G, 11:65376519:T:G, 11:65376520:G:T, 11:65376522:C:A, 11:65376522:C:T, 11:65376523:G:A, 11:65376525:A:C, 11:65376528:C:T, 11:65376538:T:G, 11:65376541:A:G, 11:65376552:C:A, 11:65376553:C:T, 11:65376556:G:T, 11:65376559:A:G, 11:65376567:C:T, 11:65376568:GTC:G, 11:65376568:G:A, 11:65376577:C:T, 11:65376584:C:G, 11:65376589:T:A, 11:65376591:C:T, 11:65376608:TA:T, 11:65376615:G:A, 11:65376615:G:T, 11:65376627:C:A, 11:65376633:G:T, 11:65376637:T:C, 11:65376648:C:A, 11:65376648:C:T, 11:65376655:C:T, 11:65376657:A:G, 11:65376664:C:A, 11:65376670:C:A, 11:65376670:C:T, 11:65376674:G:T, 11:65376829:C:G, 11:65376847:C:T, 11:65376860:C:T, 11:65376886:G:A, 11:65376893:T:C, 11:65376895:T:A, 11:65376904:G:A, 11:65376912:C:A, 11:65376921:TCG:T, 11:65376923:G:A, 11:65376929:G:GC, 11:65376935:G:A, 11:65376937:G:A, 11:65376949:C:T, 11:65376964:G:A, 11:65376986:A:T, 11:65376989:G:A, 11:65376992:G:T, 11:65376993:T:TG, 11:65376994:G:T, 11:65376994:G:C, 11:65376995:G:T, 11:65377001:T:C, 11:65377013:C:T, 11:65377020:C:G, 11:65377021:T:C, 11:65377029:G:C, 11:65377039:C:T, 11:65377054:T:C, 11:65377063:G:T, 11:65377077:C:A, 11:65379375:C:T, 11:65379382:G:T, 11:65379384:AC:A, 11:65379389:C:T, 11:65379390:C:T, 11:65379394:G:T, 11:65379401:G:A, 11:65379404:A:T, 11:65379406:G:T, 11:65379408:A:G, 11:65379416:A:G, 11:65379418:G:T, 11:65379428:G:A, 11:65379429:G:T, 11:65379437:C:T, 11:65379437:C:G, 11:65379440:C:T, 11:65379442:C:G, 11:65379443:T:C, 11:65379444:C:T, 11:65379450:G:T, 11:65379452:G:C, 11:65379458:G:T, 11:65379458:G:C, 11:65379461:G:A, 11:65379467:A:G, 11:65379468:C:T, 11:65379473:AG:A, 11:65379485:T:C, 11:65379512:A:G, 11:65379518:A:G, 11:65379530:G:A, 11:65379537:T:C, 11:65379542:C:T, 11:65379877:C:T, 11:65379902:C:T, 11:65379905:T:C, 11:65379910:C:T, 11:65379911:G:A, 11:65379922:TG:T, 11:65379923:G:A, 11:65379934:C:A, 11:65380148:G:C, 11:65380157:A:G, 11:65380164:A:C, 11:65380166:C:A, 11:65380176:C:A, 11:65381939:C:G, 11:65381944:A:G, 11:65381947:G:A, 11:65376409:A:T, 11:65376429:T:C, 11:65376448:T:C, 11:65376468:G:A, 11:65376471:C:T, 11:65376478:T:A, 11:65376480:T:C, 11:65376493:C:T, 11:65376510:A:G, 11:65376520:G:A, 11:65376568:G:T, 11:65376582:A:G, 11:65376643:C:T, 11:65376648:C:G, 11:65376675:C:G, 11:65376829:C:A, 11:65376830:C:CT, 11:65376832:T:C, 11:65376848:G:A, 11:65376851:A:C, 11:65376862:T:G, 11:65376887:T:C, 11:65376916:G:T, 11:65376917:C:T, 11:65376918:TC:T, 11:65376919:C:G, 11:65376922:C:T, 11:65376950:G:A, 11:65376961:G:A, 11:65376970:T:C, 11:65376977:G:T, 11:65376988:C:T, 11:65376997:G:A, 11:65376999:G:C, 11:65377009:T:C, 11:65377012:G:C, 11:65377034:G:C, 11:65377036:A:G, 11:65377040:G:A, 11:65377058:A:G, 11:65379374:A:G, 11:65379378:G:T, 11:65379410:A:T, 11:65379421:G:C, 11:65379432:G:T, 11:65379437:C:A, 11:65379438:G:A, 11:65379439:CCG:C, 11:65379441:G:A, 11:65379471:G:T, 11:65379476:G:A, 11:65379494:A:G, 11:65379527:A:G, 11:65379866:C:T, 11:65379878:G:A, 11:65379881:A:C, 11:65379884:TCTTGACCATGCAATCAA:T, 11:65379938:C:T, 11:65380137:C:T, 11:65380142:T:C, 11:65380151:T:A, 11:65376411:C:T, 11:65376420:C:A, 11:65376433:C:A, 11:65376445:A:C, 11:65376451:C:T, 11:65376453:G:A, 11:65376454:C:A, 11:65376462:G:A, 11:65376463:G:A, 11:65376466:A:AG, 11:65376469:C:T, 11:65376490:C:T, 11:65376490:C:A, 11:65376492:C:G, 11:65376492:C:T, 11:65376499:A:G, 11:65376500:G:C, 11:65376502:A:C, 11:65376506:TC:T, 11:65376508:C:T, 11:65376511:G:T, 11:65376515:T:G, 11:65376519:T:C, 11:65376526:T:C, 11:65376529:T:C, 11:65376535:C:T, 11:65376537:A:G, 11:65376540:C:A, 11:65376540:C:CT, 11:65376543:T:C, 11:65376546:A:G, 11:65376550:T:A, 11:65376557:G:C, 11:65376558:T:TA, 11:65376561:A:G, 11:65376564:C:T, 11:65376573:A:G, 11:65376579:T:C, 11:65376589:T:C, 11:65376592:G:A, 11:65376605:G:C, 11:65376609:A:C, 11:65376609:A:G, 11:65376618:G:A, 11:65376640:C:T, 11:65376642:G:A, 11:65376649:C:T, 11:65376655:C:A, 11:65376657:A:C, 11:65376660:A:G, 11:65376663:A:C, 11:65376666:G:A, 11:65376669:G:A, 11:65376672:G:A, 11:65376675:C:A, 11:65376676:C:T, 11:65376677:T:A, 11:65376677:T:C, 11:65376815:T:TA, 11:65376817:C:G, 11:65376823:T:A, 11:65376837:TG:T, 11:65376842:A:C, 11:65376844:T:C, 11:65376844:T:G, 11:65376847:C:A, 11:65376856:C:T, 11:65376857:C:G, 11:65376862:T:C, 11:65376865:G:T, 11:65376870:G:T, 11:65376872:A:C, 11:65376874:T:G, 11:65376875:A:G, 11:65376877:A:T, 11:65376878:T:TCC, 11:65376886:G:T, 11:65376887:TG:T, 11:65376892:G:T, 11:65376893:T:G, 11:65376910:G:A, 11:65376910:GC:G, 11:65376911:C:T, 11:65376912:C:T, 11:65376917:C:A, 11:65376919:C:T, 11:65376922:C:A, 11:65376922:C:G, 11:65376926:A:G, 11:65376928:A:C, 11:65376929:G:T, 11:65376931:C:T, 11:65376932:C:G, 11:65376934:C:T, 11:65376938:G:A, 11:65376944:C:T, 11:65376944:C:G, 11:65376944:C:A, 11:65376947:C:T, 11:65376955:A:G, 11:65376956:T:C, 11:65376974:C:T, 11:65376983:G:T, 11:65376994:G:A, 11:65376998:G:A, 11:65377004:C:G, 11:65377015:C:G, 11:65377022:C:T, 11:65377025:T:C, 11:65377025:T:A, 11:65377029:G:GT, 11:65377052:G:A, 11:65377064:C:T, 11:65377068:A:C, 11:65377070:A:G, 11:65377075:G:T, 11:65377078:T:C, 11:65379373:C:CA, 11:65379374:A:C, 11:65379384:A:AC, 11:65379386:C:A, 11:65379386:C:G, 11:65379387:C:T, 11:65379390:C:G, 11:65379393:T:C, 11:65379395:C:T, 11:65379398:C:T, 11:65379402:C:A, 11:65379411:T:C, 11:65379414:G:A, 11:65379415:C:T, 11:65379432:G:A, 11:65379435:C:T, 11:65379435:C:A, 11:65379449:TG:T, 11:65379464:A:G, 11:65379465:G:T, 11:65379474:G:C, 11:65379497:A:G, 11:65379509:A:G, 11:65379513:C:T, 11:65379518:A:T, 11:65379534:A:G, 11:65379551:A:T, 11:65379552:A:C, 11:65379554:C:T, 11:65379860:CACTCACGG:C, 11:65379866:C:G, 11:65379872:C:A, 11:65379872:C:G, 11:65379877:C:A, 11:65379885:C:A, 11:65379886:T:C, 11:65379901:A:G, 11:65379904:A:G, 11:65379908:C:G, 11:65379910:C:A, 11:65379922:T:G, 11:65379925:G:A, 11:65379938:C:A, 11:65379939:C:G, 11:65380130:A:C, 11:65380132:C:A, 11:65380148:G:A, 11:65380161:C:T, 11:65380167:C:T, 11:65380173:C:T, 11:65381921:T:C, 11:65381922:C:A, 11:65381927:C:A, 11:65381939:C:T, 11:65381945:C:G, 11:65381945:C:T, 11:65381948:G:A, 11:65381948:G:T, 11:65381950:A:T, and 11:65381950:A:G (according to the GRCh38/hg38 human genome assembly).

[0265] In some embodiments, the subject's aggregate gene burden of having any one or more SLC25A45 variant nucleic acid molecules encoding SLC25A45 predicted loss-of-function polypeptides represents a weighted sum of a plurality of any of the SLC25A45 variant nucleic acid molecules encoding SLC25A45 predicted loss-of-function polypeptides. In some embodiments, the aggregate gene burden is calculated using at least about 2, at least about 3, at least about 4, at least about 5, at least about 10, at least about 20, at least about 30, at least about 40, at least about 50, at least about 60, at least about 70, at least about 80, at least about 100, at least about 120, at least about 150, at least about 200, at least about 250, at least about 300, at least about 400, at least about 500, at least about 1,000, at least about 10,000, at least about 100,000, or at least about or more than 1,000,000 genetic variants present in or around (up to 10 Mb) the SLC25A45 gene where the gene burden is the number of alleles multiplied by the association estimate with kidney disease or related outcome for each allele (e.g., a weighted burden score). This can include any genetic variants, regardless of their genomic annotation, in proximity to the SLC25A45 gene (up to 10 Mb around the gene) that show a non-zero association with kidney disease-related traits in a genetic association analysis. In some embodiments, when the subject has an aggregate gene burden above a desired threshold score, the subject has a decreased risk of developing a kidney disease. In some embodiments, when the subject has an aggregate gene burden below a desired threshold score, the subject has an increased risk of developing a kidney disease.

[0266] In some embodiments, any of the methods described herein can further comprise determining the subject's aggregate gene burden of having SLC7A9 variant nucleic acid molecules encoding SLC7A9 predicted loss-of-function polypeptides associated with a decreased risk of developing a kidney disease. The aggregate gene burden is the sum of all variants in the SLC7A9 gene, which can be carried out in an association analysis with a kidney disease. In some embodiments, the subject is homozygous for one or more SLC7A9 variant nucleic acid molecules encoding SLC7A9 predicted loss-of-function polypeptides associated with a decreased risk of developing a kidney disease. In some embodiments, the subject is heterozygous for one or more SLC7A9 variant nucleic acid molecules encoding SLC7A9 predicted loss-of-function polypeptides associated with a decreased risk of developing a kidney disease. The result of the association analysis suggests that SLC7A9 variant nucleic acid molecules encoding SLC7A9 predicted loss-of-function polypeptides are associated with decreased risk of developing a kidney disease. When the subject has a lower aggregate gene burden, the subject is at a higher risk of developing a kidney disease and the subject is administered or continued to be administered a therapeutic agent that treats, prevents, or inhibits a kidney disease in an amount that is the same as or less than a standard dosage amount, and/or an SLC7A9 inhibitor. When the subject has a greater aggregate gene burden, the subject is at a lower risk of developing a kidney disease and the subject is administered or continued to be administered a therapeutic agent that treats, prevents, or inhibits a kidney disease in a standard dosage amount. The greater the aggregate gene burden, the lower the risk of developing a kidney disease.

[0267] SLC7A9 predicted loss-of-function variants include, but are not limited to: 19:32830686:T:C, 19:32833195:G:T, 19:32833214:A:C, 19:32833242:C:A, 19:32833244:C:T, 19:32833280:AAC:A, 19:32842318:C:G, 19:32858454:G:T, 19:32858458:GTC:G, 19:32858477:TGGTTGAAAATG:T, 19:32858482:GA:G, 19:32858533:TCA:T, 19:32860638:ATTGAG:A, 19:32862207:C:CT, 19:32862459:A:G, 19:32862561:C:CAGTG, 19:32864161:GCA:G, 19:32864174:C:CG, 19:32864204:ACG:A, 19:32864283:A:T, 19:32864293:CCT:C, 19:32864648:G:T, 19:32868560:C:A, 19:32868561:T:C, 19:32830626:A:AG, 19:32833161:G:A, 19:32843856:TA:T, 19:32843856:TAA:T, 19:32858533:TC:T, 19:32859899:AC:A, 19:32860605:C:G, 19:32862127:TA:T, 19:32862460:C:T, 19:32862587:C:T, 19:32864294:CT:C, 19:32868486:G:A, 19:32868534:T:C, 19:32868560:C:T, 19:32868561:T:A, 19:32830615:GCTTGTT:G, 19:32830624:TC:T, 19:32830685:C:G, 19:32833146:T:TA, 19:32833154:A:AT, 19:32833195:GTAAAA:G, 19:32833225:CA:C, 19:32833315:T:TACGG, 19:32842167:C:A, 19:32842191:T:A, 19:32842248:C:CG, 19:32842278:TTA:T, 19:32842315:AC:A, 19:32843853:A:G, 19:32843854:C:A, 19:32843878:GA:G, 19:32843942:G:T, 19:32843952:C:T, 19:32859848:AC:A, 19:32859917:CA:C, 19:32859928:CA:C, 19:32859961:GT:G, 19:32860604:A:T, 19:32860628:CTG:C, 19:32862126:A:T, 19:32862209:TTG:T, 19:32864120:TCA:T, 19:32864169:A:T, 19:32864277:G:T, 19:32864289:T:TC, 19:32864289:TCC:T, 19:32864627:A:T, 19:32864627:A:ACCCAG, 19:32864701:C:CAG, 19:32868455:TG:T, 19:32868505:TC:T, and 19:32868507:T:A (according to the GRCh38/hg38 human genome assembly).

[0268] SLC7A9 pLOF or missense variants with AAF<1% include, but are not limited to: 19:32830639:G:A, 19:32830640:G:A, 19:32830646:C:T, 19:32830670:G:C, 19:32830681:G:A, 19:32830686:T:C, 19:32833160:T:C, 19:32833179:A:G, 19:32833195:G:T, 19:32833206:G:C, 19:32833214:A:C, 19:32833236:G:A, 19:32833242:C:A, 19:32833244:C:T, 19:32833247:G:A, 19:32833247:G:T, 19:32833247:G:C, 19:32833251:G:A, 19:32833262:A:T, 19:32833280:AAC:A, 19:32833295:G:A, 19:32833317:C:T, 19:32833319:G:A, 19:32833322:A:G, 19:32842188:C:T, 19:32842190:T:C, 19:32842193:C:T, 19:32842196:G:C, 19:32842196:G:A, 19:32842200:A:G, 19:32842203:T:C, 19:32842209:C:T, 19:32842212:T:C, 19:32842214:A:G, 19:32842226:G:A, 19:32842245:A:G, 19:32842248:C:T, 19:32842255:G:C, 19:32842274:G:A, 19:32842301:A:G, 19:32842304:G:A, 19:32842308:C:T, 19:32842310:A:C, 19:32842316:C:A, 19:32842318:C:G, 19:32843869:C:T, 19:32843886:C:T, 19:32843886:C:A, 19:32843893:C:T, 19:32843899:T:C, 19:32843910:A:C, 19:32843925:C:A, 19:32843932:G:A, 19:32843941:C:T, 19:32858440:C:G, 19:32858446:G:A, 19:32858454:G:T, 19:32858455:C:G, 19:32858458:GTC:G, 19:32858462:C:T, 19:32858477:TGGTTGAAAATG:T, 19:32858482:GA:G, 19:32858489:C:T, 19:32858497:A:C, 19:32858497:A:G, 19:32858533:TCA:T, 19:32858534:C:T, 19:32859857:G:A, 19:32859870:C:T, 19:32859885:C:T, 19:32859887:G:A, 19:32859900:C:T, 19:32859902:T:C, 19:32859920:G:A, 19:32859932:G:A, 19:32859939:C:T, 19:32859940:G:C, 19:32860618:C:A, 19:32860638:ATTGAG:A, 19:32860648:T:G, 19:32862119:A:G, 19:32862127:T:C, 19:32862142:T:C, 19:32862151:G:A, 19:32862151:G:C, 19:32862182:C:T, 19:32862207:C:CT, 19:32862214:T:A, 19:32862459:A:G, 19:32862466:G:T, 19:32862478:A:G, 19:32862481:C:T, 19:32862503:C:T, 19:32862506:T:A, 19:32862518:C:A, 19:32862518:C:T, 19:32862520:G:A, 19:32862521:C:T, 19:32862524:T:C, 19:32862539:C:G, 19:32862539:C:T, 19:32862553:C:T, 19:32862554:G:A, 19:32862561:C:CAGTG, 19:32862583:A:G, 19:32862586:A:G, 19:32864102:C:T, 19:32864105:C:T, 19:32864108:C:T, 19:32864152:T:A, 19:32864155:A:G, 19:32864161:G:A, 19:32864161:GCA:G, 19:32864174:C:T, 19:32864174:C:CG, 19:32864179:A:T, 19:32864204:ACG:A, 19:32864206:G:A, 19:32864209:G:A, 19:32864219:C:T, 19:32864220:G:C, 19:32864242:A:G, 19:32864245:T:C, 19:32864249:C:T, 19:32864252:G:A, 19:32864261:C:T, 19:32864272:A:T, 19:32864279:A:G, 19:32864281:G:A, 19:32864283:A:T, 19:32864293:CCT:C, 19:32864294:C:G, 19:32864307:C:A, 19:32864326:A:C, 19:32864332:A:T, 19:32864336:C:A, 19:32864629:C:A, 19:32864634:G:A, 19:32864637:G:T, 19:32864641:G:A, 19:32864643:A:G, 19:32864646:C:A, 19:32864647:C:T, 19:32864647:C:G, 19:32864648:G:T, 19:32864653:C:T, 19:32864657:C:G, 19:32864660:T:C, 19:32864664:A:T, 19:32864682:G:C, 19:32864688:G:A, 19:32864695:T:G, 19:32864716:C:T, 19:32864724:C:G, 19:32864734:T:C, 19:32864735:G:C, 19:32864746:C:T, 19:32864752:T:C, 19:32868465:T:C, 19:32868479:T:C, 19:32868491:G:A, 19:32868491:G:C, 19:32868509:C:T, 19:32868512:T:C, 19:32868519:G:T, 19:32868560:C:A, 19:32868561:T:C, 19:32830624:T:A, 19:32830624:T:G, 19:32830626:A:AG, 19:32833149:T:C, 19:32833161:G:A, 19:32833241:T:C, 19:32833251:G:T, 19:32833254:T:G, 19:32833289:A:T, 19:32833296:T:G, 19:32833305:C:T, 19:32833316:A:G, 19:32842205:A:C, 19:32843856:TAA:T, 19:32843856:TA:T, 19:32843874:G:A, 19:32843880:G:A, 19:32843884:G:T, 19:32843887:G:A, 19:32843901:T:G, 19:32843937:G:A, 19:32843943:T:C, 19:32858507:T:G, 19:32858530:C:T, 19:32858533:TC:T, 19:32859851:G:A, 19:32859897:A:G, 19:32859899:AC:A, 19:32860605:C:G, 19:32860613:G:A, 19:32860633:A:G, 19:32860639:T:C, 19:32862127:TA:T, 19:32862131:C:T, 19:32862147:A:C, 19:32862188:C:T, 19:32862198:A:T, 19:32862200:C:G, 19:32862202:A:T, 19:32862460:C:T, 19:32862482:C:T, 19:32862485:T:C, 19:32862506:T:C, 19:32862523:G:A, 19:32862557:C:T, 19:32862563:G:C, 19:32862587:C:T, 19:32864161:G:T, 19:32864163:A:C, 19:32864164:C:A, 19:32864165:A:G, 19:32864198:C:T, 19:32864226:G:C, 19:32864288:C:G, 19:32864294:CT:C, 19:32864302:G:T, 19:32864323:G:A, 19:32864635:T:G, 19:32864638:C:T, 19:32864661:A:C, 19:32864662:T:C, 19:32864665:T:G, 19:32864698:G:T, 19:32864706:T:G, 19:32864710:G:C, 19:32864712:G:A, 19:32864763:C:T, 19:32864764:T:C, 19:32868451:C:G, 19:32868451:C:A, 19:32868485:T:G, 19:32868486:G:A, 19:32868492:A:T, 19:32868499:A:C, 19:32868518:A:C, 19:32868534:T:C, 19:32868560:C:T, 19:32868561:T:A, 19:32830615:GCTTGTT:G, 19:32830624:TC:T, 19:32830629:G:T, 19:32830634:C:T, 19:32830639:G:T, 19:32830653:C:T, 19:32830654:A:G, 19:32830669:T:C, 19:32830670:G:A, 19:32830670:G:T, 19:32830671:C:T, 19:32830672:A:G, 19:32830673:T:C, 19:32830685:C:G, 19:32833146:T:TA, 19:32833154:A:AT, 19:32833159:C:G, 19:32833167:A:G, 19:32833172:A:C, 19:32833181:T:C, 19:32833187:A:G, 19:32833195:GTAAAA:G, 19:32833208:C:T, 19:32833209:C:T, 19:32833217:A:G, 19:32833223:A:G, 19:32833225:CA:C, 19:32833226:A:G, 19:32833235:A:G, 19:32833242:C:G, 19:32833260:T:A, 19:32833280:A:G, 19:32833281:A:G, 19:32833281:A:C, 19:32833284:C:T, 19:32833302:A:T, 19:32833315:T:TACGG, 19:32842167:C:A, 19:32842169:T:C, 19:32842171:G:C, 19:32842175:G:A, 19:32842177:C:A, 19:32842179:T:A, 19:32842187:T:G, 19:32842191:T:A, 19:32842191:T:C, 19:32842198:A:T, 19:32842215:G:A, 19:32842218:C:T, 19:32842230:G:C, 19:32842232:C:A, 19:32842248:C:CG, 19:32842260:A:C, 19:32842270:T:A, 19:32842271:A:G, 19:32842277:T:A, 19:32842278:TTA:T, 19:32842278:T:C, 19:32842280:A:G, 19:32842296:T:C, 19:32842298:T:C, 19:32842299:A:C, 19:32842304:G:T, 19:32842311:T:C, 19:32842315:AC:A, 19:32843853:A:G, 19:32843854:C:A, 19:32843858:A:C, 19:32843868:G:T, 19:32843878:GA:G, 19:32843892:A:G, 19:32843913:T:G, 19:32843914:T:G, 19:32843920:T:C, 19:32843931:C:T, 19:32843942:G:T, 19:32843952:C:T, 19:32858440:C:T, 19:32858441:T:C, 19:32858452:A:G, 19:32858453:A:G, 19:32858459:T:A, 19:32858471:C:T, 19:32858474:C:T, 19:32858495:A:G, 19:32858504:C:T, 19:32858506:A:G, 19:32858510:A:C, 19:32858521:T:C, 19:32858521:T:G, 19:32858527:A:G, 19:32858531:G:A, 19:32858536:C:A, 19:32859846:C:T, 19:32859848:AC:A, 19:32859851:G:T, 19:32859852:C:T, 19:32859872:G:A, 19:32859873:T:C, 19:32859875:G:A, 19:32859878:G:A, 19:32859880:C:T, 19:32859888:T:C, 19:32859890:A:T, 19:32859896:G:C, 19:32859905:A:G, 19:32859908:A:T, 19:32859917:CA:C, 19:32859920:G:C, 19:32859923:G:A, 19:32859928:CA:C, 19:32859942:T:A, 19:32859945:T:C, 19:32859960:G:C, 19:32859961:GT:G, 19:32859963:T:G, 19:32860604:A:T, 19:32860606:C:T, 19:32860613:G:T, 19:32860628:CTG:C, 19:32860646:G:T, 19:32860648:T:C, 19:32862122:C:T, 19:32862123:A:T, 19:32862123:A:C, 19:32862124:T:C, 19:32862126:A:T, 19:32862128:A:C, 19:32862130:G:C, 19:32862136:A:G, 19:32862136:A:C, 19:32862139:C:T, 19:32862146:A:G, 19:32862172:G:A, 19:32862178:T:C, 19:32862185:C:T, 19:32862191:A:G, 19:32862193:G:T, 19:32862209:TTG:T, 19:32862472:A:G, 19:32862476:C:T, 19:32862483:G:T, 19:32862483:G:C, 19:32862487:A:G, 19:32862490:A:G, 19:32862493:A:T, 19:32862494:T:C, 19:32862496:A:G, 19:32862497:T:C, 19:32862503:C:A, 19:32862515:T:C, 19:32862531:G:T, 19:32862535:T:C, 19:32862536:G:T, 19:32862538:A:G, 19:32862547:C:T, 19:32862548:C:G, 19:32862554:G:C, 19:32862572:C:T, 19:32862574:G:C, 19:32862574:G:A, 19:32862577:G:A, 19:32862582:G:C, 19:32864099:T:C, 19:32864102:C:A, 19:32864120:TCA:T, 19:32864126:C:T, 19:32864131:T:G, 19:32864135:G:A, 19:32864138:G:C, 19:32864143:C:A, 19:32864150:C:T, 19:32864158:G:C, 19:32864159:G:A, 19:32864169:A:T, 19:32864173:T:C, 19:32864183:T:C, 19:32864183:T:G, 19:32864190:G:C, 19:32864206:G:T, 19:32864216:T:G, 19:32864219:C:A, 19:32864230:G:A, 19:32864234:A:C, 19:32864234:A:G, 19:32864240:A:G, 19:32864243:G:A, 19:32864245:T:G, 19:32864254:A:G, 19:32864255:T:G, 19:32864272:A:C, 19:32864277:G:T, 19:32864281:G:C, 19:32864282:G:T, 19:32864285:A:G, 19:32864289:T:TC, 19:32864289:TCC:T, 19:32864290:C:T, 19:32864299:T:C, 19:32864299:T:A, 19:32864299:T:G, 19:32864308:A:G, 19:32864311:G:A, 19:32864314:C:G, 19:32864317:A:C, 19:32864327:A:G, 19:32864332:A:C, 19:32864627:A:T, 19:32864627:A:ACCCAG, 19:32864637:G:A, 19:32864646:C:T, 19:32864652:G:A, 19:32864655:G:A, 19:32864655:G:T, 19:32864656:C:T, 19:32864659:A:G, 19:32864664:A:G, 19:32864667:A:T, 19:32864671:A:G, 19:32864677:C:T, 19:32864682:G:A, 19:32864700:A:T, 19:32864701:C:G, 19:32864701:C:CAG, 19:32864703:G:A, 19:32864705:C:G, 19:32864709:G:A, 19:32864710:G:A, 19:32864717:G:T, 19:32864733:A:G, 19:32864745:A:C, 19:32864748:A:G, 19:32864757:A:T, 19:32864758:T:C, 19:32864763:C:G, 19:32864765:G:C, 19:32864773:C:T, 19:32868455:TG:T, 19:32868462:T:C, 19:32868464:G:T, 19:32868476:T:C, 19:32868505:T:G, 19:32868505:TC:T, 19:32868507:T:A, 19:32868507:T:C, 19:32868510:G:A, 19:32868510:G:C, 19:32868522:C:T, and 19:32868530:C:T (according to the GRCh38/hg38 human genome assembly).

[0269] In some embodiments, the subject's aggregate gene burden of having any one or more SLC7A9 variant nucleic acid molecules encoding SLC7A9 predicted loss-of-function polypeptides represents a weighted sum of a plurality of any of the SLC7A9 variant nucleic acid molecules encoding SLC7A9 predicted loss-of-function polypeptides. In some embodiments, the aggregate gene burden is calculated using at least about 2, at least about 3, at least about 4, at least about 5, at least about 10, at least about 20, at least about 30, at least about 40, at least about 50, at least about 60, at least about 70, at least about 80, at least about 100, at least about 120, at least about 150, at least about 200, at least about 250, at least about 300, at least about 400, at least about 500, at least about 1,000, at least about 10,000, at least about 100,000, or at least about or more than 1,000,000 genetic variants present in or around (up to 10 Mb) the SLC7A9 gene where the gene burden is the number of alleles multiplied by the association estimate with kidney disease or related outcome for each allele (e.g., a weighted burden score). This can include any genetic variants, regardless of their genomic annotation, in proximity to the SLC7A9 gene (up to 10 Mb around the gene) that show a non-zero association with kidney disease-related traits in a genetic association analysis. In some embodiments, when the subject has an aggregate gene burden above a desired threshold score, the subject has a decreased risk of developing a kidney disease. In some embodiments, when the subject has an aggregate gene burden below a desired threshold score, the subject has an increased risk of developing a kidney disease.

[0270] In some embodiments, the aggregate gene burden may be divided into quintiles, e.g., top quintile, intermediate quintile, and bottom quintile, wherein the top quintile of aggregate gene burden corresponds to the lowest risk group and the bottom quintile of aggregate gene burden corresponds to the highest risk group. In some embodiments, a subject having a greater aggregate gene burden comprises the highest weighted aggregate burdens, including, but not limited to the top 10%, top 20%, top 30%, top 40%, or top 50% of aggregate gene burdens from a subject population. In some embodiments, the genetic variants comprise the genetic variants having association with a kidney disease in the top 10%, top 20%, top 30%, top 40%, or top 50% of p-value range for the association. In some embodiments, each of the identified genetic variants comprise the genetic variants having association with a kidney disease with p-value of no more than about 10⁻², about 10⁻³, about 10⁻⁴, about 10⁻⁵, about 10⁻⁶, about 10⁻⁷, about 10⁻⁸, about 10⁻⁹, about 10⁻¹⁰, about 10⁻¹¹, about 10⁻¹², about 10⁻¹³, about 10⁻¹⁴, about or 10⁻¹⁵. In some embodiments, the identified genetic variants comprise the genetic variants having association with a kidney disease with p-value of less than 5×10⁻⁸. In some embodiments, the identified genetic variants comprise genetic variants having association with a kidney disease in high-risk subjects as compared to the rest of the reference population with odds ratio (OR) about 1.5 or greater, about 1.75 or greater, about 2.0 or greater, or about 2.25 or greater for the top 20% of the distribution; or about 1.5 or greater, about 1.75 or greater, about 2.0 or greater, about 2.25 or greater, about 2.5 or greater, or about 2.75 or greater. In some embodiments, the odds ratio (OR) may range from about 1.0 to about 1.5, from about 1.5 to about 2.0, from about 2.0 to about 2.5, from about 2.5 to about 3.0, from about 3.0 to about 3.5, from about 3.5 to about 4.0, from about 4.0 to about 4.5, from about 4.5 to about 5.0, from about 5.0 to about 5.5, from about 5.5 to about 6.0, from about 6.0 to about 6.5, from about 6.5 to about 7.0, or greater than 7.0. In some embodiments, high-risk subjects comprise subjects having aggregate gene burdens in the bottom decile, quintile, or tertile in a reference population. The threshold of the aggregate gene burden is determined on the basis of the nature of the intended practical application and the risk difference that would be considered meaningful for that practical application.

[0271] In some embodiments, when a subject is identified as having an increased risk of developing a kidney disease, the subject is further administered a therapeutic agent that treats, prevents, or inhibits a kidney disease, and/or an ALDH1L1 inhibitor, as described herein. For example, when the subject is ALDH1L1 reference, and therefore has an increased risk of developing a kidney disease, the subject is administered an ALDH1L1 inhibitor. In some embodiments, such a subject is also administered a therapeutic agent that treats, prevents, or inhibits a kidney disease. In some embodiments, when the subject is heterozygous for an ALDH1L1 variant nucleic acid molecule encoding an ALDH1L1 predicted loss-of-function polypeptide, the subject is administered the therapeutic agent that treats, prevents, or inhibits a kidney disease in a dosage amount that is the same as or less than a standard dosage amount, and is also administered an ALDH1L1 inhibitor. In some embodiments, the subject is ALDH1L1 reference. In some embodiments, the subject is heterozygous for an ALDH1L1 variant nucleic acid molecule encoding an ALDH1L1 predicted loss-of-function polypeptide. Furthermore, when the subject has a lower aggregate gene burden for having an ALDH1L1 variant nucleic acid molecule encoding an ALDH1L1 predicted loss-of-function polypeptide, and therefore has an increased risk of developing a kidney disease, the subject is administered a therapeutic agent that treats, prevents, or inhibits a kidney disease. In some embodiments, when the subject has a lower aggregate gene burden for having an ALDH1L1 variant nucleic acid molecule encoding an ALDH1L1 predicted loss-of-function polypeptide, the subject is administered the therapeutic agent that treats, prevents, or inhibits a kidney disease in a dosage amount that is the same as or less than the standard dosage amount administered to a subject who has a greater aggregate gene burden for having an ALDH1L1 variant nucleic acid molecule encoding an ALDH1L1 predicted loss-of-function polypeptide.

[0272] In some embodiments, when a subject is identified as having an increased risk of developing a kidney disease, the subject is further administered a therapeutic agent that treats, prevents, or inhibits a kidney disease, and/or an ALDOB inhibitor, as described herein. For example, when the subject is ALDOB reference, and therefore has an increased risk of developing a kidney disease, the subject is administered an ALDOB inhibitor. In some embodiments, such a subject is also administered a therapeutic agent that treats, prevents, or inhibits a kidney disease. In some embodiments, when the subject is heterozygous for an ALDOB variant nucleic acid molecule encoding an ALDOB predicted loss-of-function polypeptide, the subject is administered the therapeutic agent that treats, prevents, or inhibits a kidney disease in a dosage amount that is the same as or less than a standard dosage amount, and is also administered an ALDOB inhibitor. In some embodiments, the subject is ALDOB reference. In some embodiments, the subject is heterozygous for an ALDOB variant nucleic acid molecule encoding an ALDOB predicted loss-of-function polypeptide. Furthermore, when the subject has a lower aggregate gene burden for having an ALDOB variant nucleic acid molecule encoding an ALDOB predicted loss-of-function polypeptide, and therefore has an increased risk of developing a kidney disease, the subject is administered a therapeutic agent that treats, prevents, or inhibits a kidney disease. In some embodiments, when the subject has a lower aggregate gene burden for having an ALDOB variant nucleic acid molecule encoding an ALDOB predicted loss-of-function polypeptide, the subject is administered the therapeutic agent that treats, prevents, or inhibits a kidney disease in a dosage amount that is the same as or less than the standard dosage amount administered to a subject who has a greater aggregate gene burden for having an ALDOB variant nucleic acid molecule encoding an ALDOB predicted loss-of-function polypeptide.

[0273] In some embodiments, when a subject is identified as having an increased risk of developing a kidney disease, the subject is further administered a therapeutic agent that treats, prevents, or inhibits a kidney disease, and/or a G6PC inhibitor, as described herein. For example, when the subject is G6PC reference, and therefore has an increased risk of developing a kidney disease, the subject is administered a G6PC inhibitor. In some embodiments, such a subject is also administered a therapeutic agent that treats, prevents, or inhibits a kidney disease. In some embodiments, when the subject is heterozygous for a G6PC variant nucleic acid molecule encoding a G6PC predicted loss-of-function polypeptide, the subject is administered the therapeutic agent that treats, prevents, or inhibits a kidney disease in a dosage amount that is the same as or less than a standard dosage amount, and is also administered a G6PC inhibitor. In some embodiments, the subject is G6PC reference. In some embodiments, the subject is heterozygous for a G6PC variant nucleic acid molecule encoding a G6PC predicted loss-of-function polypeptide. Furthermore, when the subject has a lower aggregate gene burden for having a G6PC variant nucleic acid molecule encoding a G6PC predicted loss-of-function polypeptide, and therefore has an increased risk of developing a kidney disease, the subject is administered a therapeutic agent that treats, prevents, or inhibits a kidney disease. In some embodiments, when the subject has a lower aggregate gene burden for having a G6PC variant nucleic acid molecule encoding a G6PC predicted loss-of-function polypeptide, the subject is administered the therapeutic agent that treats, prevents, or inhibits a kidney disease in a dosage amount that is the same as or less than the standard dosage amount administered to a subject who has a greater aggregate gene burden for having a G6PC variant nucleic acid molecule encoding a G6PC predicted loss-of-function polypeptide.

[0274] In some embodiments, when a subject is identified as having an increased risk of developing a kidney disease, the subject is further administered a therapeutic agent that treats, prevents, or inhibits a kidney disease, and/or an LRP2 inhibitor, as described herein. For example, when the subject is LRP2 reference, and therefore has an increased risk of developing a kidney disease, the subject is administered an LRP2 inhibitor. In some embodiments, such a subject is also administered a therapeutic agent that treats, prevents, or inhibits a kidney disease. In some embodiments, when the subject is heterozygous for an LRP2 variant nucleic acid molecule encoding an LRP2 predicted loss-of-function polypeptide, the subject is administered the therapeutic agent that treats, prevents, or inhibits a kidney disease in a dosage amount that is the same as or less than a standard dosage amount, and is also administered an LRP2 inhibitor. In some embodiments, the subject is LRP2 reference. In some embodiments, the subject is heterozygous for an LRP2 variant nucleic acid molecule encoding an LRP2 predicted loss-of-function polypeptide. Furthermore, when the subject has a lower aggregate gene burden for having an LRP2 variant nucleic acid molecule encoding an LRP2 predicted loss-of-function polypeptide, and therefore has an increased risk of developing a kidney disease, the subject is administered a therapeutic agent that treats, prevents, or inhibits a kidney disease. In some embodiments, when the subject has a lower aggregate gene burden for having an LRP2 variant nucleic acid molecule encoding an LRP2 predicted loss-of-function polypeptide, the subject is administered the therapeutic agent that treats, prevents, or inhibits a kidney disease in a dosage amount that is the same as or less than the standard dosage amount administered to a subject who has a greater aggregate gene burden for having an LRP2 variant nucleic acid molecule encoding an LRP2 predicted loss-of-function polypeptide.

[0275] In some embodiments, when a subject is identified as having an increased risk of developing a kidney disease, the subject is further administered a therapeutic agent that treats, prevents, or inhibits a kidney disease, and/or an RPL3L inhibitor, as described herein. For example, when the subject is RPL3L reference, and therefore has an increased risk of developing a kidney disease, the subject is administered an RPL3L inhibitor. In some embodiments, such a subject is also administered a therapeutic agent that treats, prevents, or inhibits a kidney disease. In some embodiments, when the subject is heterozygous for an RPL3L variant nucleic acid molecule encoding an RPL3L predicted loss-of-function polypeptide, the subject is administered the therapeutic agent that treats, prevents, or inhibits a kidney disease in a dosage amount that is the same as or less than a standard dosage amount, and is also administered an RPL3L inhibitor. In some embodiments, the subject is RPL3L reference. In some embodiments, the subject is heterozygous for an RPL3L variant nucleic acid molecule encoding an RPL3L predicted loss-of-function polypeptide. Furthermore, when the subject has a lower aggregate gene burden for having an RPL3L variant nucleic acid molecule encoding an RPL3L predicted loss-of-function polypeptide, and therefore has an increased risk of developing a kidney disease, the subject is administered a therapeutic agent that treats, prevents, or inhibits a kidney disease. In some embodiments, when the subject has a lower aggregate gene burden for having an RPL3L variant nucleic acid molecule encoding an RPL3L predicted loss-of-function polypeptide, the subject is administered the therapeutic agent that treats, prevents, or inhibits a kidney disease in a dosage amount that is the same as or less than the standard dosage amount administered to a subject who has a greater aggregate gene burden for having an RPL3L variant nucleic acid molecule encoding an RPL3L predicted loss-of-function polypeptide.

[0276] In some embodiments, when a subject is identified as having an increased risk of developing a kidney disease, the subject is further administered a therapeutic agent that treats, prevents, or inhibits a kidney disease, and/or an SLC25A45 inhibitor, as described herein. For example, when the subject is SLC25A45 reference, and therefore has an increased risk of developing a kidney disease, the subject is administered an SLC25A45 inhibitor. In some embodiments, such a subject is also administered a therapeutic agent that treats, prevents, or inhibits a kidney disease. In some embodiments, when the subject is heterozygous for an SLC25A45 variant nucleic acid molecule encoding an SLC25A45 predicted loss-of-function polypeptide, the subject is administered the therapeutic agent that treats, prevents, or inhibits a kidney disease in a dosage amount that is the same as or less than a standard dosage amount, and is also administered an SLC25A45 inhibitor. In some embodiments, the subject is SLC25A45 reference. In some embodiments, the subject is heterozygous for an SLC25A45 variant nucleic acid molecule encoding an SLC25A45 predicted loss-of-function polypeptide. Furthermore, when the subject has a lower aggregate gene burden for having an SLC25A45 variant nucleic acid molecule encoding an SLC25A45 predicted loss-of-function polypeptide, and therefore has an increased risk of developing a kidney disease, the subject is administered a therapeutic agent that treats, prevents, or inhibits a kidney disease. In some embodiments, when the subject has a lower aggregate gene burden for having an SLC25A45 variant nucleic acid molecule encoding an SLC25A45 predicted loss-of-function polypeptide, the subject is administered the therapeutic agent that treats, prevents, or inhibits a kidney disease in a dosage amount that is the same as or less than the standard dosage amount administered to a subject who has a greater aggregate gene burden for having an SLC25A45 variant nucleic acid molecule encoding an SLC25A45 predicted loss-of-function polypeptide.

[0277] In some embodiments, when a subject is identified as having an increased risk of developing a kidney disease, the subject is further administered a therapeutic agent that treats, prevents, or inhibits a kidney disease, and/or an SLC7A9 inhibitor, as described herein. For example, when the subject is SLC7A9 reference, and therefore has an increased risk of developing a kidney disease, the subject is administered an SLC7A9 inhibitor. In some embodiments, such a subject is also administered a therapeutic agent that treats, prevents, or inhibits a kidney disease. In some embodiments, when the subject is heterozygous for an SLC7A9 variant nucleic acid molecule encoding an SLC7A9 predicted loss-of-function polypeptide, the subject is administered the therapeutic agent that treats, prevents, or inhibits a kidney disease in a dosage amount that is the same as or less than a standard dosage amount, and is also administered an SLC7A9 inhibitor. In some embodiments, the subject is SLC7A9 reference. In some embodiments, the subject is heterozygous for an SLC7A9 variant nucleic acid molecule encoding an SLC7A9 predicted loss-of-function polypeptide. Furthermore, when the subject has a lower aggregate gene burden for having an SLC7A9 variant nucleic acid molecule encoding an SLC7A9 predicted loss-of-function polypeptide, and therefore has an increased risk of developing a kidney disease, the subject is administered a therapeutic agent that treats, prevents, or inhibits a kidney disease. In some embodiments, when the subject has a lower aggregate gene burden for having an SLC7A9 variant nucleic acid molecule encoding an SLC7A9 predicted loss-of-function polypeptide, the subject is administered the therapeutic agent that treats, prevents, or inhibits a kidney disease in a dosage amount that is the same as or less than the standard dosage amount administered to a subject who has a greater aggregate gene burden for having an SLC7A9 variant nucleic acid molecule encoding an SLC7A9 predicted loss-of-function polypeptide.

[0278] In some embodiments, when the subject has a lower aggregate gene burden for having one or more of ALDH1L1, ALDOB, G6PC, LRP2, RPL3L, SLC25A45, and/or SLC7A9 variant nucleic acid molecules encoding one or more of ALDH1L1, ALDOB, G6PC, LRP2, RPL3L, SLC25A45, and/or SLC7A9 predicted loss-of-function polypeptides, and therefore has an increased risk of developing a kidney disease, the subject is administered a therapeutic agent that treats, prevents, or inhibits a kidney disease. In some embodiments, when the subject has a lower aggregate gene burden for having one or more of ALDH1L1, ALDOB, G6PC, LRP2, RPL3L, SLC25A45, and/or SLC7A9 variant nucleic acid molecules encoding one or more of ALDH1L1, ALDOB, G6PC, LRP2, RPL3L, SLC25A45, and/or SLC7A9 predicted loss-of-function polypeptides, the therapeutic agent that prevents a kidney disease is administered or continued to be administered to the subject in an amount that is the same as or less than the standard dosage amount administered to a subject who has a greater aggregate gene burden for having one or more of ALDH1L1, ALDOB, G6PC, LRP2, RPL3L, SLC25A45, and/or SLC7A9 variant nucleic acid molecules encoding one or more of ALDH1L1, ALDOB, G6PC, LRP2, RPL3L, SLC25A45, and/or SLC7A9 predicted loss-of-function polypeptides.

[0279] In addition, the subject may be administered a combination of any one or more ALDH1L1 inhibitors, ALDOB inhibitors, G6PC inhibitors, LRP2 inhibitors, RPL3L inhibitors, SLC25A45 inhibitors, and/or SLC7A9 inhibitors, wherein the combination comprises the inhibitors for the targets for which the the lower gene burden for having one or more of ALDH1L1, ALDOB, G6PC, LRP2, RPL3L, SLC25A45, and/or SLC7A9 variant nucleic acid molecules encoding one or more of ALDH1L1, ALDOB, G6PC, LRP2, RPL3L, SLC25A45, and/or SLC7A9 predicted loss-of-function polypeptides. For example, when the subject is determined to have lower gene burden of ALDOB, G6PC, RPL3L, and SLC7A9 variant nucleic acid molecules encoding ALDOB, G6PC, RPL3L, and SLC7A9 predicted loss-of-function polypeptides, the subject is is administered or continued to be administered the therapeutic agent that treats, prevents, or inhibits a kidney disease in an amount that is the same as or less than a standard dosage amount and is administered a combination of an ALDOB inhibitor, a G6PC inhibitor, a RPL3L inhibitor, and an SLC7A9 inhibitor. In some embodiments, the subject is administered the combination of inhibitors that corresponds to any subset of ALDH1L1, ALDOB, G6PC, LRP2, RPL3L, SLC25A45, and/or SLC7A9 for which the subject was found to have a lower gene burden of variant nucleic acid molecule encoding corresponding loss-of-function polypeptides. The presence of a lower gene burden of any one or more ALDH1L1, ALDOB, G6PC, LRP2, RPL3L, SLC25A45, and/or SLC7A9 predicted loss-of-function polypeptides indicates the subject has a increased risk of developing a kidney disease. The presence of a greater gene burden of any one or more of ALDH1L1, ALDOB, G6PC, LRP2, RPL3L, SLC25A45, and/or SLC7A9 predicted loss-of-function polypeptides is considered more protective of kidney diseases. Thus, having a greater gene burden of any four of ALDH1L1, ALDOB, G6PC, LRP2, RPL3L, SLC25A45, and SLC7A9 predicted loss-of-function polypeptides is more protective than having a gene burden of any three of ALDH1L1, ALDOB, G6PC, LRP2, RPL3L, SLC25A45, and SLC7A9 predicted loss-of-function polypeptides, which is, in turn, more protective than having a gene burden of any two of ALDH1L1, ALDOB, G6PC, LRP2, RPL3L, SLC25A45, and SLC7A9 predicted loss-of-function polypeptides.

[0280] In any of the embodiments described herein the individual aggregate gene burdens for any combination of ALDH1L1, ALDOB, G6PC, LRP2, RPL3L, SLC25A45, and SLC7A9 can be combined into a single aggregate gene burden.

[0281] The present disclosure also provides methods of detecting the presence or absence of any one or more of ALDH1L1, ALDOB, G6PC, LRP2, RPL3L, SLC25A45, and/or SLC7A9 variant nucleic acid molecules (i.e., genomic nucleic acid molecules, mRNA molecules, or cDNA molecules produced from an mRNA molecucles) encoding any one or more of ALDH1L1, ALDOB, G6PC, LRP2, RPL3L, SLC25A45, and/or SLC7A9 predicted loss-of-function polypeptides in a biological sample from a subject. It is understood that gene sequences within a population and mRNA molecules encoded by such genes can vary due to polymorphisms such as single-nucleotide polymorphisms. The sequences provided herein for the ALDH1L1, ALDOB, G6PC, LRP2, RPL3L, SLC25A45, and SLC7A9 variant genomic nucleic acid molecules, ALDH1L1, ALDOB, G6PC, LRP2, RPL3L, SLC25A45, and SLC7A9 variant mRNA molecules, and ALDH1L1, ALDOB, G6PC, LRP2, RPL3L, SLC25A45, and SLC7A9 variant cDNA molecules are only exemplary sequences. Other sequences for the ALDH1L1, ALDOB, G6PC, LRP2, RPL3L, SLC25A45, and SLC7A9 variant genomic nucleic acid molecule, variant mRNA molecule, and variant cDNA molecule are also possible.

[0282] The biological sample can be derived from any cell, tissue, or biological fluid from the subject. The biological sample may comprise any clinically relevant tissue, such as a bone marrow sample, a tumor biopsy, a fine needle aspirate, or a sample of bodily fluid, such as blood, gingival crevicular fluid, plasma, serum, lymph, ascitic fluid, cystic fluid, or urine. In some cases, the sample comprises a buccal swab. The biological sample used in the methods disclosed herein can vary based on the assay format, nature of the detection method, and the tissues, cells, or extracts that are used as the sample. A biological sample can be processed differently depending on the assay being employed. For example, when detecting any one or more of ALDH1L1, ALDOB, G6PC, LRP2, RPL3L, SLC25A45, and/or SLC7A9 variant nucleic acid molecules encoding one or more of ALDH1L1, ALDOB, G6PC, LRP2, RPL3L, SLC25A45, and/or SLC7A9 predicted loss-of-function polypeptides, preliminary processing designed to isolate or enrich the biological sample for the genomic DNA can be employed. A variety of techniques may be used for this purpose. When detecting the level of any one or more of ALDH1L1, ALDOB, G6PC, LRP2, RPL3L, SLC25A45, and/or SLC7A9 variant mRNA molecules, different techniques can be used enrich the biological sample with mRNA molecules. Various methods to detect the presence or level of an mRNA molecule or the presence of a particular variant genomic DNA locus can be used.

[0283] In some embodiments, detecting an ALDH1L1 variant nucleic acid molecule encoding an ALDH1L1 predicted loss-of-function polypeptide in a subject comprises performing a sequence analysis on a biological sample obtained from the subject to determine whether an ALDH1L1 genomic nucleic acid molecule in the biological sample, and/or an ALDH1L1 mRNA molecule in the biological sample, and/or an ALDH1L1 cDNA molecule produced from an mRNA molecule in the biological sample, comprises one or more variations that cause a loss-of-function (partial or complete) or are predicted to cause a loss-of-function (partial or complete).

[0284] In some embodiments, the methods of detecting the presence or absence of an ALDH1L1 variant nucleic acid molecule encoding an ALDH1L1 predicted loss-of-function polypeptide (such as, for example, a genomic nucleic acid molecule, an mRNA molecule, and/or a cDNA molecule produced from an mRNA molecule) in a subject, comprise performing an assay on a biological sample obtained from the subject. The assay determines whether a nucleic acid molecule in the biological sample comprises a particular nucleotide sequence.

[0285] In some embodiments, the biological sample comprises a cell or cell lysate. Such methods can further comprise, for example, obtaining a biological sample from the subject comprising an ALDH1L1 genomic nucleic acid molecule or mRNA molecule, and if mRNA, optionally reverse transcribing the mRNA into cDNA. Such assays can comprise, for example determining the identity of these positions of the particular ALDH1L1 nucleic acid molecule. In some embodiments, the method is an in vitro method.

[0286] In some embodiments, the determining step, detecting step, or sequence analysis comprises sequencing at least a portion of the nucleotide sequence of the ALDH1L1 genomic nucleic acid molecule, the ALDH1L1 mRNA molecule, or the ALDH1L1 cDNA molecule in the biological sample, wherein the sequenced portion comprises one or more variations that cause a loss-of-function (partial or complete) or are predicted to cause a loss-of-function (partial or complete).

[0287] In some embodiments, the assay comprises sequencing the entire nucleic acid molecule. In some embodiments, only an ALDH1L1 genomic nucleic acid molecule is analyzed. In some embodiments, only an ALDH1L1 mRNA is analyzed. In some embodiments, only an ALDH1L1 cDNA obtained from ALDH1L1 mRNA is analyzed.

[0288] In some embodiments, detecting an ALDOB variant nucleic acid molecule encoding an ALDOB predicted loss-of-function polypeptide in a subject comprises performing a sequence analysis on a biological sample obtained from the subject to determine whether an ALDOB genomic nucleic acid molecule in the biological sample, and/or an ALDOB mRNA molecule in the biological sample, and/or an ALDOB cDNA molecule produced from an mRNA molecule in the biological sample, comprises one or more variations that cause a loss-of-function (partial or complete) or are predicted to cause a loss-of-function (partial or complete).

[0289] In some embodiments, the methods of detecting the presence or absence of an ALDOB variant nucleic acid molecule encoding an ALDOB predicted loss-of-function polypeptide (such as, for example, a genomic nucleic acid molecule, an mRNA molecule, and/or a cDNA molecule produced from an mRNA molecule) in a subject, comprise performing an assay on a biological sample obtained from the subject. The assay determines whether a nucleic acid molecule in the biological sample comprises a particular nucleotide sequence.

[0290] In some embodiments, the biological sample comprises a cell or cell lysate. Such methods can further comprise, for example, obtaining a biological sample from the subject comprising an ALDOB genomic nucleic acid molecule or mRNA molecule, and if mRNA, optionally reverse transcribing the mRNA into cDNA. Such assays can comprise, for example determining the identity of these positions of the particular ALDOB nucleic acid molecule. In some embodiments, the method is an in vitro method.

[0291] In some embodiments, the determining step, detecting step, or sequence analysis comprises sequencing at least a portion of the nucleotide sequence of the ALDOB genomic nucleic acid molecule, the ALDOB mRNA molecule, or the ALDOB cDNA molecule in the biological sample, wherein the sequenced portion comprises one or more variations that cause a loss-of-function (partial or complete) or are predicted to cause a loss-of-function (partial or complete).

[0292] In some embodiments, the assay comprises sequencing the entire nucleic acid molecule. In some embodiments, only an ALDOB genomic nucleic acid molecule is analyzed. In some embodiments, only an ALDOB mRNA is analyzed. In some embodiments, only an ALDOB cDNA obtained from ALDOB mRNA is analyzed.

[0293] In some embodiments, detecting a G6PC variant nucleic acid molecule encoding a G6PC predicted loss-of-function polypeptide in a subject comprises performing a sequence analysis on a biological sample obtained from the subject to determine whether a G6PC genomic nucleic acid molecule in the biological sample, and/or a G6PC mRNA molecule in the biological sample, and/or a G6PC cDNA molecule produced from an mRNA molecule in the biological sample, comprises one or more variations that cause a loss-of-function (partial or complete) or are predicted to cause a loss-of-function (partial or complete).

[0294] In some embodiments, the methods of detecting the presence or absence of a G6PC variant nucleic acid molecule encoding a G6PC predicted loss-of-function polypeptide (such as, for example, a genomic nucleic acid molecule, an mRNA molecule, and/or a cDNA molecule produced from an mRNA molecule) in a subject, comprise performing an assay on a biological sample obtained from the subject. The assay determines whether a nucleic acid molecule in the biological sample comprises a particular nucleotide sequence.

[0295] In some embodiments, the biological sample comprises a cell or cell lysate. Such methods can further comprise, for example, obtaining a biological sample from the subject comprising a G6PC genomic nucleic acid molecule or mRNA molecule, and if mRNA, optionally reverse transcribing the mRNA into cDNA. Such assays can comprise, for example determining the identity of these positions of the particular G6PC nucleic acid molecule. In some embodiments, the method is an in vitro method.

[0296] In some embodiments, the determining step, detecting step, or sequence analysis comprises sequencing at least a portion of the nucleotide sequence of the G6PC genomic nucleic acid molecule, the G6PC mRNA molecule, or the G6PC cDNA molecule in the biological sample, wherein the sequenced portion comprises one or more variations that cause a loss-of-function (partial or complete) or are predicted to cause a loss-of-function (partial or complete).

[0297] In some embodiments, the assay comprises sequencing the entire nucleic acid molecule. In some embodiments, only a G6PC genomic nucleic acid molecule is analyzed. In some embodiments, only a G6PC mRNA is analyzed. In some embodiments, only a G6PC cDNA obtained from G6PC mRNA is analyzed.

[0298] In some embodiments, detecting an LRP2 variant nucleic acid molecule encoding an LRP2 predicted loss-of-function polypeptide in a subject comprises performing a sequence analysis on a biological sample obtained from the subject to determine whether an LRP2 genomic nucleic acid molecule in the biological sample, and/or an LRP2 mRNA molecule in the biological sample, and/or an LRP2 cDNA molecule produced from an mRNA molecule in the biological sample, comprises one or more variations that cause a loss-of-function (partial or complete) or are predicted to cause a loss-of-function (partial or complete).

[0299] In some embodiments, the methods of detecting the presence or absence of an LRP2 variant nucleic acid molecule encoding an LRP2 predicted loss-of-function polypeptide (such as, for example, a genomic nucleic acid molecule, an mRNA molecule, and/or a cDNA molecule produced from an mRNA molecule) in a subject, comprise performing an assay on a biological sample obtained from the subject. The assay determines whether a nucleic acid molecule in the biological sample comprises a particular nucleotide sequence.

[0300] In some embodiments, the biological sample comprises a cell or cell lysate. Such methods can further comprise, for example, obtaining a biological sample from the subject comprising an LRP2 genomic nucleic acid molecule or mRNA molecule, and if mRNA, optionally reverse transcribing the mRNA into cDNA. Such assays can comprise, for example determining the identity of these positions of the particular LRP2 nucleic acid molecule. In some embodiments, the method is an in vitro method.

[0301] In some embodiments, the determining step, detecting step, or sequence analysis comprises sequencing at least a portion of the nucleotide sequence of the LRP2 genomic nucleic acid molecule, the LRP2 mRNA molecule, or the LRP2 cDNA molecule in the biological sample, wherein the sequenced portion comprises one or more variations that cause a loss-of-function (partial or complete) or are predicted to cause a loss-of-function (partial or complete).

[0302] In some embodiments, the assay comprises sequencing the entire nucleic acid molecule. In some embodiments, only an LRP2 genomic nucleic acid molecule is analyzed. In some embodiments, only an LRP2 mRNA is analyzed. In some embodiments, only an LRP2 cDNA obtained from LRP2 mRNA is analyzed.

[0303] In some embodiments, detecting an RPL3L variant nucleic acid molecule encoding an RPL3L predicted loss-of-function polypeptide in a subject comprises performing a sequence analysis on a biological sample obtained from the subject to determine whether an RPL3L genomic nucleic acid molecule in the biological sample, and/or an RPL3L mRNA molecule in the biological sample, and/or an RPL3L cDNA molecule produced from an mRNA molecule in the biological sample, comprises one or more variations that cause a loss-of-function (partial or complete) or are predicted to cause a loss-of-function (partial or complete).

[0304] In some embodiments, the methods of detecting the presence or absence of an RPL3L variant nucleic acid molecule encoding an RPL3L predicted loss-of-function polypeptide (such as, for example, a genomic nucleic acid molecule, an mRNA molecule, and/or a cDNA molecule produced from an mRNA molecule) in a subject, comprise performing an assay on a biological sample obtained from the subject. The assay determines whether a nucleic acid molecule in the biological sample comprises a particular nucleotide sequence.

[0305] In some embodiments, the biological sample comprises a cell or cell lysate. Such methods can further comprise, for example, obtaining a biological sample from the subject comprising an RPL3L genomic nucleic acid molecule or mRNA molecule, and if mRNA, optionally reverse transcribing the mRNA into cDNA. Such assays can comprise, for example determining the identity of these positions of the particular RPL3L nucleic acid molecule. In some embodiments, the method is an in vitro method.

[0306] In some embodiments, the determining step, detecting step, or sequence analysis comprises sequencing at least a portion of the nucleotide sequence of the RPL3L genomic nucleic acid molecule, the RPL3L mRNA molecule, or the RPL3L cDNA molecule in the biological sample, wherein the sequenced portion comprises one or more variations that cause a loss-of-function (partial or complete) or are predicted to cause a loss-of-function (partial or complete).

[0307] In some embodiments, the assay comprises sequencing the entire nucleic acid molecule. In some embodiments, only an RPL3L genomic nucleic acid molecule is analyzed. In some embodiments, only an RPL3L mRNA is analyzed. In some embodiments, only an RPL3L cDNA obtained from RPL3L mRNA is analyzed.

[0308] In some embodiments, detecting an SLC25A45 variant nucleic acid molecule encoding an SLC25A45 predicted loss-of-function polypeptide in a subject comprises performing a sequence analysis on a biological sample obtained from the subject to determine whether an SLC25A45 genomic nucleic acid molecule in the biological sample, and/or an SLC25A45 mRNA molecule in the biological sample, and/or an SLC25A45 cDNA molecule produced from an mRNA molecule in the biological sample, comprises one or more variations that cause a loss-of-function (partial or complete) or are predicted to cause a loss-of-function (partial or complete).

[0309] In some embodiments, the methods of detecting the presence or absence of an SLC25A45 variant nucleic acid molecule encoding an SLC25A45 predicted loss-of-function polypeptide (such as, for example, a genomic nucleic acid molecule, an mRNA molecule, and/or a cDNA molecule produced from an mRNA molecule) in a subject, comprise performing an assay on a biological sample obtained from the subject. The assay determines whether a nucleic acid molecule in the biological sample comprises a particular nucleotide sequence.

[0310] In some embodiments, the biological sample comprises a cell or cell lysate. Such methods can further comprise, for example, obtaining a biological sample from the subject comprising an SLC25A45 genomic nucleic acid molecule or mRNA molecule, and if mRNA, optionally reverse transcribing the mRNA into cDNA. Such assays can comprise, for example determining the identity of these positions of the particular SLC25A45 nucleic acid molecule. In some embodiments, the method is an in vitro method.

[0311] In some embodiments, the determining step, detecting step, or sequence analysis comprises sequencing at least a portion of the nucleotide sequence of the SLC25A45 genomic nucleic acid molecule, the SLC25A45 mRNA molecule, or the SLC25A45 cDNA molecule in the biological sample, wherein the sequenced portion comprises one or more variations that cause a loss-of-function (partial or complete) or are predicted to cause a loss-of-function (partial or complete).

[0312] In some embodiments, the assay comprises sequencing the entire nucleic acid molecule. In some embodiments, only an SLC25A45 genomic nucleic acid molecule is analyzed. In some embodiments, only an SLC25A45 mRNA is analyzed. In some embodiments, only an SLC25A45 cDNA obtained from SLC25A45 mRNA is analyzed.

[0313] In some embodiments, detecting an SLC7A9 variant nucleic acid molecule encoding an SLC7A9 predicted loss-of-function polypeptide in a subject comprises performing a sequence analysis on a biological sample obtained from the subject to determine whether an SLC7A9 genomic nucleic acid molecule in the biological sample, and/or an SLC7A9 mRNA molecule in the biological sample, and/or an SLC7A9 cDNA molecule produced from an mRNA molecule in the biological sample, comprises one or more variations that cause a loss-of-function (partial or complete) or are predicted to cause a loss-of-function (partial or complete).

[0314] In some embodiments, the methods of detecting the presence or absence of an SLC7A9 variant nucleic acid molecule encoding an SLC7A9 predicted loss-of-function polypeptide (such as, for example, a genomic nucleic acid molecule, an mRNA molecule, and/or a cDNA molecule produced from an mRNA molecule) in a subject, comprise performing an assay on a biological sample obtained from the subject. The assay determines whether a nucleic acid molecule in the biological sample comprises a particular nucleotide sequence.

[0315] In some embodiments, the biological sample comprises a cell or cell lysate. Such methods can further comprise, for example, obtaining a biological sample from the subject comprising an SLC7A9 genomic nucleic acid molecule or mRNA molecule, and if mRNA, optionally reverse transcribing the mRNA into cDNA. Such assays can comprise, for example determining the identity of these positions of the particular SLC7A9 nucleic acid molecule. In some embodiments, the method is an in vitro method.

[0316] In some embodiments, the determining step, detecting step, or sequence analysis comprises sequencing at least a portion of the nucleotide sequence of the SLC7A9 genomic nucleic acid molecule, the SLC7A9 mRNA molecule, or the SLC7A9 cDNA molecule in the biological sample, wherein the sequenced portion comprises one or more variations that cause a loss-of-function (partial or complete) or are predicted to cause a loss-of-function (partial or complete).

[0317] In some embodiments, the assay comprises sequencing the entire nucleic acid molecule. In some embodiments, only an SLC7A9 genomic nucleic acid molecule is analyzed. In some embodiments, only an SLC7A9 mRNA is analyzed. In some embodiments, only an SLC7A9 cDNA obtained from SLC7A9 mRNA is analyzed.

[0318] Alteration-specific polymerase chain reaction techniques can be used to detect mutations such as SNPs in a nucleic acid sequence. Alteration-specific primers can be used because the DNA polymerase will not extend when a mismatch with the template is present.

[0319] In some embodiments, the nucleic acid molecule in the sample is mRNA and the mRNA is reverse-transcribed into a cDNA prior to the amplifying step. In some embodiments, the nucleic acid molecule is present within a cell obtained from the subject.

[0320] In some embodiments, the assay comprises contacting the biological sample with a primer or probe, such as an alteration-specific primer or alteration-specific probe, that specifically hybridizes to an ALDH1L1 variant genomic sequence, variant mRNA sequence, or variant cDNA sequence and not the corresponding ALDH1L1 reference sequence under stringent conditions, and determining whether hybridization has occurred.

[0321] In some embodiments, the determining step, detecting step, or sequence analysis comprises: a) amplifying at least a portion of the nucleic acid molecule that encodes the ALDH1L1 polypeptide; b) labeling the amplified nucleic acid molecule with a detectable label; c) contacting the labeled nucleic acid molecule with a support comprising an alteration-specific probe; and d) detecting the detectable label.

[0322] In some embodiments, the assay comprises contacting the biological sample with a primer or probe, such as an alteration-specific primer or alteration-specific probe, that specifically hybridizes to an ALDOB variant genomic sequence, variant mRNA sequence, or variant cDNA sequence and not the corresponding ALDOB reference sequence under stringent conditions, and determining whether hybridization has occurred.

[0323] In some embodiments, the determining step, detecting step, or sequence analysis comprises: a) amplifying at least a portion of the nucleic acid molecule that encodes the ALDOB polypeptide; b) labeling the amplified nucleic acid molecule with a detectable label; c) contacting the labeled nucleic acid molecule with a support comprising an alteration-specific probe; and d) detecting the detectable label.

[0324] In some embodiments, the assay comprises contacting the biological sample with a primer or probe, such as an alteration-specific primer or alteration-specific probe, that specifically hybridizes to a G6PC variant genomic sequence, variant mRNA sequence, or variant cDNA sequence and not the corresponding G6PC reference sequence under stringent conditions, and determining whether hybridization has occurred.

[0325] In some embodiments, the determining step, detecting step, or sequence analysis comprises: a) amplifying at least a portion of the nucleic acid molecule that encodes the G6PC polypeptide; b) labeling the amplified nucleic acid molecule with a detectable label; c) contacting the labeled nucleic acid molecule with a support comprising an alteration-specific probe; and d) detecting the detectable label.

[0326] In some embodiments, the assay comprises contacting the biological sample with a primer or probe, such as an alteration-specific primer or alteration-specific probe, that specifically hybridizes to an LRP2 variant genomic sequence, variant mRNA sequence, or variant cDNA sequence and not the corresponding LRP2 reference sequence under stringent conditions, and determining whether hybridization has occurred.

[0327] In some embodiments, the determining step, detecting step, or sequence analysis comprises: a) amplifying at least a portion of the nucleic acid molecule that encodes the LRP2 polypeptide; b) labeling the amplified nucleic acid molecule with a detectable label; c) contacting the labeled nucleic acid molecule with a support comprising an alteration-specific probe; and d) detecting the detectable label.

[0328] In some embodiments, the assay comprises contacting the biological sample with a primer or probe, such as an alteration-specific primer or alteration-specific probe, that specifically hybridizes to an RPL3L variant genomic sequence, variant mRNA sequence, or variant cDNA sequence and not the corresponding RPL3L reference sequence under stringent conditions, and determining whether hybridization has occurred.

[0329] In some embodiments, the determining step, detecting step, or sequence analysis comprises: a) amplifying at least a portion of the nucleic acid molecule that encodes the RPL3L polypeptide; b) labeling the amplified nucleic acid molecule with a detectable label; c) contacting the labeled nucleic acid molecule with a support comprising an alteration-specific probe; and d) detecting the detectable label.

[0330] In some embodiments, the assay comprises contacting the biological sample with a primer or probe, such as an alteration-specific primer or alteration-specific probe, that specifically hybridizes to an SLC25A45 variant genomic sequence, variant mRNA sequence, or variant cDNA sequence and not the corresponding SLC25A45 reference sequence under stringent conditions, and determining whether hybridization has occurred.

[0331] In some embodiments, the determining step, detecting step, or sequence analysis comprises: a) amplifying at least a portion of the nucleic acid molecule that encodes the SLC25A45 polypeptide; b) labeling the amplified nucleic acid molecule with a detectable label; c) contacting the labeled nucleic acid molecule with a support comprising an alteration-specific probe; and d) detecting the detectable label.

[0332] In some embodiments, the assay comprises contacting the biological sample with a primer or probe, such as an alteration-specific primer or alteration-specific probe, that specifically hybridizes to an SLC7A9 variant genomic sequence, variant mRNA sequence, or variant cDNA sequence and not the corresponding SLC7A9 reference sequence under stringent conditions, and determining whether hybridization has occurred.

[0333] In some embodiments, the determining step, detecting step, or sequence analysis comprises: a) amplifying at least a portion of the nucleic acid molecule that encodes the SLC7A9 polypeptide; b) labeling the amplified nucleic acid molecule with a detectable label; c) contacting the labeled nucleic acid molecule with a support comprising an alteration-specific probe; and d) detecting the detectable label.

[0334] In some embodiments, the assay comprises RNA sequencing (RNA-Seq). In some embodiments, the assays also comprise reverse transcribing mRNA into cDNA, such as by the reverse transcriptase polymerase chain reaction (RT-PCR).

[0335] In some embodiments, the methods utilize probes and primers of sufficient nucleotide length to bind to the target nucleotide sequence and specifically detect and/or identify a polynucleotide comprising an ALDH1L1 variant genomic nucleic acid molecule, variant mRNA molecule, or variant cDNA molecule, an ALDOB variant genomic nucleic acid molecule, variant mRNA molecule, or variant cDNA molecule, a G6PC variant genomic nucleic acid molecule, variant mRNA molecule, or variant cDNA molecule, an LRP2 variant genomic nucleic acid molecule, variant mRNA molecule, or variant cDNA molecule, an RPL3L variant genomic nucleic acid molecule, variant mRNA molecule, or variant cDNA molecule, an SLC25A45 variant genomic nucleic acid molecule, variant mRNA molecule, or variant cDNA molecule, an SLC7A9 variant genomic nucleic acid molecule, variant mRNA molecule, or variant cDNA molecule. The hybridization conditions or reaction conditions can be determined by the operator to achieve this result. The nucleotide length may be any length that is sufficient for use in a detection method of choice, including any assay described or exemplified herein. Such probes and primers can hybridize specifically to a target nucleotide sequence under high stringency hybridization conditions. Probes and primers may have complete nucleotide sequence identity of contiguous nucleotides within the target nucleotide sequence, although probes differing from the target nucleotide sequence and that retain the ability to specifically detect and/or identify a target nucleotide sequence may be designed by conventional methods. Probes and primers can have about 80%, about 85%, about 90%, about 91%, about 92%, about 93%, about 94%, about 95%, about 96%, about 97%, about 98%, about 99%, or 100% sequence identity or complementarity with the nucleotide sequence of the target nucleic acid molecule.

[0336] Illustrative examples of nucleic acid sequencing techniques include, but are not limited to, chain terminator (Sanger) sequencing and dye terminator sequencing. Other methods involve nucleic acid hybridization methods other than sequencing, including using labeled primers or probes directed against purified DNA, amplified DNA, and fixed cell preparations (fluorescence in situ hybridization (FISH)). In some methods, a target nucleic acid molecule may be amplified prior to or simultaneous with detection. Illustrative examples of nucleic acid amplification techniques include, but are not limited to, polymerase chain reaction (PCR), ligase chain reaction (LCR), strand displacement amplification (SDA), and nucleic acid sequence based amplification (NASBA). Other methods include, but are not limited to, ligase chain reaction, strand displacement amplification, and thermophilic SDA (tSDA).

[0337] In hybridization techniques, stringent conditions can be employed such that a probe or primer will specifically hybridize to its target. In some embodiments, a polynucleotide primer or probe under stringent conditions will hybridize to its target sequence to a detectably greater degree than to other non-target sequences, such as, at least 2-fold, at least 3-fold, at least 4-fold, or more over background, including over 10-fold over background. In some embodiments, a polynucleotide primer or probe under stringent conditions will hybridize to its target nucleotide sequence to a detectably greater degree than to other nucleotide sequences by at least 2-fold. In some embodiments, a polynucleotide primer or probe under stringent conditions will hybridize to its target nucleotide sequence to a detectably greater degree than to other nucleotide sequences by at least 3-fold. In some embodiments, a polynucleotide primer or probe under stringent conditions will hybridize to its target nucleotide sequence to a detectably greater degree than to other nucleotide sequences by at least 4-fold. In some embodiments, a polynucleotide primer or probe under stringent conditions will hybridize to its target nucleotide sequence to a detectably greater degree than to other nucleotide sequences by over 10-fold over background. Stringent conditions are sequence-dependent and will be different in different circumstances.

[0338] Appropriate stringency conditions which promote DNA hybridization, for example, 6×sodium chloride/sodium citrate (SSC) at about 45° C., followed by a wash of 2×SSC at 50° C., are known or can be found in Current Protocols in Molecular Biology, John Wiley & Sons, N.Y. (1989), 6.3.1-6.3.6. Typically, stringent conditions for hybridization and detection will be those in which the salt concentration is less than about 1.5 M Na⁺ ion, typically about 0.01 to 1.0 M Na⁺ ion concentration (or other salts) at pH 7.0 to 8.3 and the temperature is at least about 30° C. for short probes (such as, for example, 10 to 50 nucleotides) and at least about 60° C. for longer probes (such as, for example, greater than 50 nucleotides). Stringent conditions may also be achieved with the addition of destabilizing agents such as formamide. Optionally, wash buffers may comprise about 0.1% to about 1% SDS. Duration of hybridization is generally less than about 24 hours, usually about 4 to about 12 hours. The duration of the wash time will be at least a length of time sufficient to reach equilibrium.

[0339] In some embodiments, such isolated nucleic acid molecules comprise or consist of at least about 5, at least about 8, at least about 10, at least about 11, at least about 12, at least about 13, at least about 14, at least about 15, at least about 16, at least about 17, at least about 18, at least about 19, at least about 20, at least about 21, at least about 22, at least about 23, at least about 24, at least about 25, at least about 30, at least about 35, at least about 40, at least about 45, at least about 50, at least about 55, at least about 60, at least about 65, at least about 70, at least about 75, at least about 80, at least about 85, at least about 90, at least about 95, at least about 100, at least about 200, at least about 300, at least about 400, at least about 500, at least about 600, at least about 700, at least about 800, at least about 900, at least about 1000, at least about 2000, at least about 3000, at least about 4000, or at least about 5000 nucleotides. In some embodiments, such isolated nucleic acid molecules comprise or consist of at least about 5, at least about 8, at least about 10, at least about 11, at least about 12, at least about 13, at least about 14, at least about 15, at least about 16, at least about 17, at least about 18, at least about 19, at least about 20, at least about 21, at least about 22, at least about 23, at least about 24, or at least about 25 nucleotides. In some embodiments, the isolated nucleic acid molecules comprise or consist of at least about 18 nucleotides. In some embodiments, the isolated nucleic acid molecules comprise or consists of at least about 15 nucleotides. In some embodiments, the isolated nucleic acid molecules consist of or comprise from about 10 to about 35, from about 10 to about 30, from about 10 to about 25, from about 12 to about 30, from about 12 to about 28, from about 12 to about 24, from about 15 to about 30, from about 15 to about 25, from about 18 to about 30, from about 18 to about 25, from about 18 to about 24, or from about 18 to about 22 nucleotides. In some embodiments, the isolated nucleic acid molecules consist of or comprise from about 18 to about 30 nucleotides. In some embodiments, the isolated nucleic acid molecules comprise or consist of at least about 15 nucleotides to at least about 35 nucleotides.

[0340] In some embodiments, such isolated nucleic acid molecules hybridize to ALDH1L1, ALDOB, G6PC, LRP2, RPL3L, SLC25A45, or SLC7A9 variant nucleic acid molecule (such as genomic nucleic acid molecules, mRNA molecules, and/or cDNA molecules) under stringent conditions. Such nucleic acid molecules can be used, for example, as probes, primers, alteration-specific probes, or alteration-specific primers as described or exemplified herein, and include, without limitation primers, probes, antisense RNAs, shRNAs, and siRNAs, each of which is described in more detail elsewhere herein, and can be used in any of the methods described herein.

[0341] In some embodiments, the isolated nucleic acid molecules hybridize to at least about 15 contiguous nucleotides of a nucleic acid molecule that is at least about 70%, at least about 75%, at least about 80%, at least about 85%, at least about 90%, at least about 95%, at least about 96%, at least about 97%, at least about 98%, at least about 99%, or 100% identical to ALDH1L1, ALDOB, G6PC, LRP2, RPL3L, SLC25A45, or SLC7A9 variant genomic nucleic acid molecules, ALDH1L1, ALDOB, G6PC, LRP2, RPL3L, SLC25A45, or SLC7A9 variant mRNA molecules, and/or ALDH1L1, ALDOB, G6PC, LRP2, RPL3L, SLC25A45, or SLC7A9 variant cDNA molecules. In some embodiments, the isolated nucleic acid molecules consist of or comprise from about 15 to about 100 nucleotides, or from about 15 to about 35 nucleotides. In some embodiments, the isolated nucleic acid molecules consist of or comprise from about 15 to about 100 nucleotides. In some embodiments, the isolated nucleic acid molecules consist of or comprise from about 15 to about 35 nucleotides.

[0342] In some embodiments, the alteration-specific probes and alteration-specific primers comprise DNA. In some embodiments, the alteration-specific probes and alteration-specific primers comprise RNA.

[0343] In some embodiments, the probes and primers described herein (including alteration-specific probes and alteration-specific primers) have a nucleotide sequence that specifically hybridizes to any of the nucleic acid molecules disclosed herein, or the complement thereof. In some embodiments, the probes and primers specifically hybridize to any of the nucleic acid molecules disclosed herein under stringent conditions.

[0344] In some embodiments, the primers, including alteration-specific primers, can be used in second generation sequencing or high throughput sequencing. In some instances, the primers, including alteration-specific primers, can be modified. In particular, the primers can comprise various modifications that are used at different steps of, for example, Massive Parallel Signature Sequencing (MPSS), Polony sequencing, and 454 Pyrosequencing. Modified primers can be used at several steps of the process, including biotinylated primers in the cloning step and fluorescently labeled primers used at the bead loading step and detection step. Polony sequencing is generally performed using a paired-end tags library wherein each molecule of DNA template is about 135 bp in length. Biotinylated primers are used at the bead loading step and emulsion PCR. Fluorescently labeled degenerate nonamer oligonucleotides are used at the detection step. An adaptor can contain a 5′-biotin tag for immobilization of the DNA library onto streptavidin-coated beads.

[0345] The probes and primers described herein can be used to detect a nucleotide variation within any of the ALDH1L1, ALDOB, G6PC, LRP2, RPL3L, SLC25A45, or SLC7A9 variant genomic nucleic acid molecules, ALDH1L1, ALDOB, G6PC, LRP2, RPL3L, SLC25A45, or SLC7A9 variant mRNA molecules, and/or ALDH1L1, ALDOB, G6PC, LRP2, RPL3L, SLC25A45, or SLC7A9 variant cDNA molecules disclosed herein. The primers described herein can be used to amplify ALDH1L1, ALDOB, G6PC, LRP2, RPL3L, SLC25A45, or SLC7A9 variant genomic nucleic acid molecules, ALDH1L1, ALDOB, G6PC, LRP2, RPL3L, SLC25A45, or SLC7A9 variant mRNA molecules, or ALDH1L1, ALDOB, G6PC, LRP2, RPL3L, SLC25A45, or SLC7A9 variant cDNA molecules, or a fragment thereof.

[0346] In the context of the disclosure “specifically hybridizes” means that the probe or primer (such as, for example, the alteration-specific probe or alteration-specific primer) does not hybridize to a nucleic acid sequence encoding an ALDH1L1 reference genomic nucleic acid molecule, an ALDH1L1 reference mRNA molecule, and/or an ALDH1L1 reference cDNA molecule.

[0347] In some embodiments, the probes (such as, for example, an alteration-specific probe) comprise a label. In some embodiments, the label is a fluorescent label, a radiolabel, or biotin.

[0348] The present disclosure also provides supports comprising a substrate to which any one or more of the probes disclosed herein is attached. Solid supports are solid-state substrates or supports with which molecules, such as any of the probes disclosed herein, can be associated. A form of solid support is an array. Another form of solid support is an array detector. An array detector is a solid support to which multiple different probes have been coupled in an array, grid, or other organized pattern. A form for a solid-state substrate is a microtiter dish, such as a standard 96-well type. In some embodiments, a multiwell glass slide can be employed that normally contains one array per well.

[0349] The nucleotide sequence of an ALDH1L1 reference genomic nucleic acid molecule is set forth in SEQ ID NO:1 (encompassing chr3:126,103,562-126,180,802 in the GRCh38/hg38 human genome assembly).

[0350] The nucleotide sequence of an ALDH1L1 reference mRNA molecule is set forth in SEQ ID NO:2. The nucleotide sequence of another ALDH1L1 reference mRNA molecule is set forth in SEQ ID NO:3. The nucleotide sequence of another ALDH1L1 reference mRNA molecule is set forth in SEQ ID NO:4. The nucleotide sequence of another ALDH1L1 reference mRNA molecule is set forth in SEQ ID NO:5. The nucleotide sequence of another ALDH1L1 reference mRNA molecule is set forth in SEQ ID NO:6. The nucleotide sequence of another ALDH1L1 reference mRNA molecule is set forth in SEQ ID NO:7. The nucleotide sequence of another ALDH1L1 reference mRNA molecule is set forth in SEQ ID NO:8. The nucleotide sequence of another ALDH1L1 reference mRNA molecule is set forth in SEQ ID NO:9. The nucleotide sequence of another ALDH1L1 reference mRNA molecule is set forth in SEQ ID NO:10. The nucleotide sequence of another ALDH1L1 reference mRNA molecule is set forth in SEQ ID NO:11. The nucleotide sequence of another ALDH1L1 reference mRNA molecule is set forth in SEQ ID NO:12. The nucleotide sequence of another ALDH1L1 reference mRNA molecule is set forth in SEQ ID NO:13. The nucleotide sequence of another ALDH1L1 reference mRNA molecule is set forth in SEQ ID NO:14. The nucleotide sequence of another ALDH1L1 reference mRNA molecule is set forth in SEQ ID NO:15. The nucleotide sequence of another ALDH1L1 reference mRNA molecule is set forth in SEQ ID NO:16. The nucleotide sequence of another ALDH1L1 reference mRNA molecule is set forth in SEQ ID NO:17. The nucleotide sequence of another ALDH1L1 reference mRNA molecule is set forth in SEQ ID NO:18. The nucleotide sequence of another ALDH1L1 reference mRNA molecule is set forth in SEQ ID NO:19. The nucleotide sequence of another ALDH1L1 reference mRNA molecule is set forth in SEQ ID NO:20. The nucleotide sequence of another ALDH1L1 reference mRNA molecule is set forth in SEQ ID NO:21. The nucleotide sequence of another ALDH1L1 reference mRNA molecule is set forth in SEQ ID NO:22. The nucleotide sequence of another ALDH1L1 reference mRNA molecule is set forth in SEQ ID NO:23. The nucleotide sequence of another ALDH1L1 reference mRNA molecule is set forth in SEQ ID NO:24. The nucleotide sequence of another ALDH1L1 reference mRNA molecule is set forth in SEQ ID NO:25. The nucleotide sequence of another ALDH1L1 reference mRNA molecule is set forth in SEQ ID NO:26. The nucleotide sequence of another ALDH1L1 reference mRNA molecule is set forth in SEQ ID NO:27. The nucleotide sequence of another ALDH1L1 reference mRNA molecule is set forth in SEQ ID NO:28.

[0351] The nucleotide sequence of an ALDH1L1 reference cDNA molecule is set forth in SEQ ID NO:29. The nucleotide sequence of another ALDH1L1 reference cDNA molecule is set forth in SEQ ID NO:30. The nucleotide sequence of another ALDH1L1 reference cDNA molecule is set forth in SEQ ID NO:31. The nucleotide sequence of another ALDH1L1 reference cDNA molecule is set forth in SEQ ID NO:32. The nucleotide sequence of another ALDH1L1 reference cDNA molecule is set forth in SEQ ID NO:33. The nucleotide sequence of another ALDH1L1 reference cDNA molecule is set forth in SEQ ID NO:34. The nucleotide sequence of another ALDH1L1 reference cDNA molecule is set forth in SEQ ID NO:35. The nucleotide sequence of another ALDH1L1 reference cDNA molecule is set forth in SEQ ID NO:36. The nucleotide sequence of another ALDH1L1 reference cDNA molecule is set forth in SEQ ID NO:37. The nucleotide sequence of another ALDH1L1 reference cDNA molecule is set forth in SEQ ID NO:38. The nucleotide sequence of another ALDH1L1 reference cDNA molecule is set forth in SEQ ID NO:39. The nucleotide sequence of another ALDH1L1 reference cDNA molecule is set forth in SEQ ID NO:40. The nucleotide sequence of another ALDH1L1 reference cDNA molecule is set forth in SEQ ID NO:41. The nucleotide sequence of another ALDH1L1 reference cDNA molecule is set forth in SEQ ID NO:42. The nucleotide sequence of another ALDH1L1 reference cDNA molecule is set forth in SEQ ID NO:43. The nucleotide sequence of another ALDH1L1 reference cDNA molecule is set forth in SEQ ID NO:44. The nucleotide sequence of another ALDH1L1 reference cDNA molecule is set forth in SEQ ID NO:45. The nucleotide sequence of another ALDH1L1 reference cDNA molecule is set forth in SEQ ID NO:46. The nucleotide sequence of another ALDH1L1 reference cDNA molecule is set forth in SEQ ID NO:47. The nucleotide sequence of another ALDH1L1 reference cDNA molecule is set forth in SEQ ID NO:48. The nucleotide sequence of another ALDH1L1 reference cDNA molecule is set forth in SEQ ID NO:49. The nucleotide sequence of another ALDH1L1 reference cDNA molecule is set forth in SEQ ID NO:51. The nucleotide sequence of another ALDH1L1 reference cDNA molecule is set forth in SEQ ID NO:52. The nucleotide sequence of another ALDH1L1 reference cDNA molecule is set forth in SEQ ID NO:53. The nucleotide sequence of another ALDH1L1 reference cDNA molecule is set forth in SEQ ID NO:54. The nucleotide sequence of another ALDH1L1 reference cDNA molecule is set forth in SEQ ID NO:55. The nucleotide sequence of another ALDH1L1 reference cDNA molecule is set forth in SEQ ID NO:56. The nucleotide sequence of another ALDH1L1 reference cDNA molecule is set forth in SEQ ID NO:57.

[0352] The amino acid sequence of an ALDH1L1 reference polypeptide is set forth in SEQ ID NO:58, and is 505 amino acids in length. The amino acid sequence of another ALDH1L1 reference polypeptide is set forth in SEQ ID NO:59, and is 912 amino acids in length. The amino acid sequence of another ALDH1L1 reference polypeptide is set forth in SEQ ID NO:60, and is 902 amino acids in length. The amino acid sequence of another ALDH1L1 reference polypeptide is set forth in SEQ ID NO:61, and is 801 amino acids in length. The amino acid sequence of another ALDH1L1 reference polypeptide is set forth in SEQ ID NO:62, and is 470 amino acids in length. The amino acid sequence of another ALDH1L1 reference polypeptide is set forth in SEQ ID NO:63, and is 954 amino acids in length. The amino acid sequence of another ALDH1L1 reference polypeptide is set forth in SEQ ID NO:64, and is 555 amino acids in length. The amino acid sequence of another ALDH1L1 reference polypeptide is set forth in SEQ ID NO:65, and is 240 amino acids in length. The amino acid sequence of another ALDH1L1 reference polypeptide is set forth in SEQ ID NO:66, and is 160 amino acids in length. The amino acid sequence of another ALDH1L1 reference polypeptide is set forth in SEQ ID NO:67, and is 210 amino acids in length. The amino acid sequence of another ALDH1L1 reference polypeptide is set forth in SEQ ID NO:68, and is 47 amino acids in length. The amino acid sequence of another ALDH1L1 reference polypeptide is set forth in SEQ ID NO:69, and is 177 amino acids in length. The amino acid sequence of another ALDH1L1 reference polypeptide is set forth in SEQ ID NO:70, and is 168 amino acids in length. The amino acid sequence of another ALDH1L1 reference polypeptide is set forth in SEQ ID NO:71, and is 157 amino acids in length. The amino acid sequence of another ALDH1L1 reference polypeptide is set forth in SEQ ID NO:72, and is 100 amino acids in length.

[0353] The nucleotide sequence of an ALDOB reference genomic nucleic acid molecule is set forth in SEQ ID NO:73 (encompassing chr9:101,421,439-101,449,664 in the GRCh38/hg38 human genome assembly).

[0354] The nucleotide sequence of an ALDOB reference mRNA molecule is set forth in SEQ ID NO:74. The nucleotide sequence of another ALDOB reference mRNA molecule is set forth in SEQ ID NO:75. The nucleotide sequence of another ALDOB reference mRNA molecule is set forth in SEQ ID NO:76. The nucleotide sequence of another ALDOB reference mRNA molecule is set forth in SEQ ID NO:77. The nucleotide sequence of another ALDOB reference mRNA molecule is set forth in SEQ ID NO:78. The nucleotide sequence of another ALDOB reference mRNA molecule is set forth in SEQ ID NO:79. The nucleotide sequence of another ALDOB reference mRNA molecule is set forth in SEQ ID NO:80. The nucleotide sequence of another ALDOB reference mRNA molecule is set forth in SEQ ID NO:81. The nucleotide sequence of another ALDOB reference mRNA molecule is set forth in SEQ ID NO:82. The nucleotide sequence of another ALDOB reference mRNA molecule is set forth in SEQ ID NO:83. The nucleotide sequence of another ALDOB reference mRNA molecule is set forth in SEQ ID NO:84. The nucleotide sequence of another ALDOB reference mRNA molecule is set forth in SEQ ID NO:85.

[0355] The nucleotide sequence of an ALDOB reference cDNA molecule is set forth in SEQ ID NO:86. The nucleotide sequence of another ALDOB reference cDNA molecule is set forth in SEQ ID NO:87. The nucleotide sequence of another ALDOB reference cDNA molecule is set forth in SEQ ID NO:88. The nucleotide sequence of another ALDOB reference cDNA molecule is set forth in SEQ ID NO:89. The nucleotide sequence of another ALDOB reference cDNA molecule is set forth in SEQ ID NO:90. The nucleotide sequence of another ALDOB reference cDNA molecule is set forth in SEQ ID NO:91. The nucleotide sequence of another ALDOB reference cDNA molecule is set forth in SEQ ID NO:92. The nucleotide sequence of another ALDOB reference cDNA molecule is set forth in SEQ ID NO:93. The nucleotide sequence of another ALDOB reference cDNA molecule is set forth in SEQ ID NO:94. The nucleotide sequence of another ALDOB reference cDNA molecule is set forth in SEQ ID NO:95. The nucleotide sequence of another ALDOB reference cDNA molecule is set forth in SEQ ID NO:96. The nucleotide sequence of another ALDOB reference cDNA molecule is set forth in SEQ ID NO:97.

[0356] The amino acid sequence of an ALDOB reference polypeptide is set forth in SEQ ID NO:98, and is 364 amino acids in length. The amino acid sequence of another ALDOB reference polypeptide is set forth in SEQ ID NO:99, and is 316 amino acids in length. The amino acid sequence of another ALDOB reference polypeptide is set forth in SEQ ID NO:100, and is 342 amino acids in length. The amino acid sequence of another ALDOB reference polypeptide is set forth in SEQ ID NO:101, and is 127 amino acids in length

[0357] The nucleotide sequence of a G6PC reference genomic nucleic acid molecule is set forth in SEQ ID NO:102 (encompassing chr17:42,900,799-42,914,438 in the GRCh38/hg38 human genome assembly).

[0358] The nucleotide sequence of a G6PC reference mRNA molecule is set forth in SEQ ID NO:103. The nucleotide sequence of another G6PC reference mRNA molecule is set forth in SEQ ID NO:104. The nucleotide sequence of another G6PC reference mRNA molecule is set forth in SEQ ID NO:105. The nucleotide sequence of another G6PC reference mRNA molecule is set forth in SEQ ID NO:106. The nucleotide sequence of another G6PC reference mRNA molecule is set forth in SEQ ID NO:107. The nucleotide sequence of another G6PC reference mRNA molecule is set forth in SEQ ID NO:108. The nucleotide sequence of another G6PC reference mRNA molecule is set forth in SEQ ID NO:109.

[0359] The nucleotide sequence of a G6PC reference cDNA molecule is set forth in SEQ ID NO:110. The nucleotide sequence of another G6PC reference cDNA molecule is set forth in SEQ ID NO:111. The nucleotide sequence of another G6PC reference cDNA molecule is set forth in SEQ ID NO:112. The nucleotide sequence of another G6PC reference cDNA molecule is set forth in SEQ ID NO:113. The nucleotide sequence of another G6PC reference cDNA molecule is set forth in SEQ ID NO:114. The nucleotide sequence of another G6PC reference cDNA molecule is set forth in SEQ ID NO:115. The nucleotide sequence of another G6PC reference cDNA molecule is set forth in SEQ ID NO:116.

[0360] The amino acid sequence of a G6PC reference polypeptide is set forth in SEQ ID NO:117, and is 357 amino acids in length. The amino acid sequence of another G6PC reference polypeptide is set forth in SEQ ID NO:118, and is 176 amino acids in length. The amino acid sequence of another G6PC reference polypeptide is set forth in SEQ ID NO:119, and is 163 amino acids in length.

[0361] The nucleotide sequence of an LRP2 reference genomic nucleic acid molecule is set forth in SEQ ID NO:120 (encompassing chr2:169,127,109-169,362,534 in the GRCh38/hg38 human genome assembly).

[0362] The nucleotide sequence of an LRP2 reference mRNA molecule is set forth in SEQ ID NO:121. The nucleotide sequence of another LRP2 reference mRNA molecule is set forth in SEQ ID NO:122. The nucleotide sequence of another LRP2 reference mRNA molecule is set forth in SEQ ID NO:123. The nucleotide sequence of another LRP2 reference mRNA molecule is set forth in SEQ ID NO:124. The nucleotide sequence of another LRP2 reference mRNA molecule is set forth in SEQ ID NO:125. The nucleotide sequence of another LRP2 reference mRNA molecule is set forth in SEQ ID NO:126. The nucleotide sequence of another LRP2 reference mRNA molecule is set forth in SEQ ID NO:127. The nucleotide sequence of another LRP2 reference mRNA molecule is set forth in SEQ ID NO:128. The nucleotide sequence of another LRP2 reference mRNA molecule is set forth in SEQ ID NO:129.

[0363] The nucleotide sequence of an LRP2 reference cDNA molecule is set forth in SEQ ID NO:130. The nucleotide sequence of another LRP2 reference cDNA molecule is set forth in SEQ ID NO:131. The nucleotide sequence of another LRP2 reference cDNA molecule is set forth in SEQ ID NO:132. The nucleotide sequence of another LRP2 reference cDNA molecule is set forth in SEQ ID NO:133. The nucleotide sequence of another LRP2 reference cDNA molecule is set forth in SEQ ID NO:134. The nucleotide sequence of another LRP2 reference cDNA molecule is set forth in SEQ ID NO:135. The nucleotide sequence of another LRP2 reference cDNA molecule is set forth in SEQ ID NO:136. The nucleotide sequence of another LRP2 reference cDNA molecule is set forth in SEQ ID NO:137. The nucleotide sequence of another LRP2 reference cDNA molecule is set forth in SEQ ID NO:138.

[0364] The amino acid sequence of an LRP2 reference polypeptide is set forth in SEQ ID NO:139, and is 4,655 amino acids in length. The amino acid sequence of another LRP2 reference polypeptide is set forth in SEQ ID NO:140, and is 1,255 amino acids in length. The amino acid sequence of another LRP2 reference polypeptide is set forth in SEQ ID NO:141, and is 1,751 amino acids in length. The amino acid sequence of another LRP2 reference polypeptide is set forth in SEQ ID NO:142, and is 268 amino acids in length. The amino acid sequence of another LRP2 reference polypeptide is set forth in SEQ ID NO:143, and is 646 amino acids in length.

[0365] The nucleotide sequence of an RPL3L reference genomic nucleic acid molecule is set forth in SEQ ID NO:144 (encompassing chr16:1,943,974-1,954,689 in the GRCh38/hg38 human genome assembly).

[0366] The nucleotide sequence of an RPL3L reference mRNA molecule is set forth in SEQ ID NO:145. The nucleotide sequence of another RPL3L reference mRNA molecule is set forth in SEQ ID NO:146. The nucleotide sequence of another RPL3L reference mRNA molecule is set forth in SEQ ID NO:147. The nucleotide sequence of another RPL3L reference mRNA molecule is set forth in SEQ ID NO:148. The nucleotide sequence of another RPL3L reference mRNA molecule is set forth in SEQ ID NO:149. The nucleotide sequence of another RPL3L reference mRNA molecule is set forth in SEQ ID NO:150.

[0367] The nucleotide sequence of an RPL3L reference cDNA molecule is set forth in SEQ ID NO:151. The nucleotide sequence of another RPL3L reference cDNA molecule is set forth in SEQ ID NO:152. The nucleotide sequence of another RPL3L reference cDNA molecule is set forth in SEQ ID NO:153. The nucleotide sequence of another RPL3L reference cDNA molecule is set forth in SEQ ID NO:154. The nucleotide sequence of another RPL3L reference cDNA molecule is set forth in SEQ ID NO:155. The nucleotide sequence of another RPL3L reference cDNA molecule is set forth in SEQ ID NO:156.

[0368] The amino acid sequence of an RPL3L reference polypeptide is set forth in SEQ ID NO:157, and is 407 amino acids in length. The amino acid sequence of another RPL3L reference polypeptide is set forth in SEQ ID NO:158, and is 47 amino acids in length.

[0369] The nucleotide sequence of an SLC25A45 reference genomic nucleic acid molecule is set forth in SEQ ID NO:159 (encompassing chr11:65,375,192-65,382,671 in the GRCh38/hg38 human genome assembly).

[0370] The nucleotide sequence of an SLC25A45 reference mRNA molecule is set forth in SEQ ID NO:160. The nucleotide sequence of another SLC25A45 reference mRNA molecule is set forth in SEQ ID NO:161. The nucleotide sequence of another SLC25A45 reference mRNA molecule is set forth in SEQ ID NO:162. The nucleotide sequence of another SLC25A45 reference mRNA molecule is set forth in SEQ ID NO:163. The nucleotide sequence of another SLC25A45 reference mRNA molecule is set forth in SEQ ID NO:164. The nucleotide sequence of another SLC25A45 reference mRNA molecule is set forth in SEQ ID NO:165. The nucleotide sequence of another SLC25A45 reference mRNA molecule is set forth in SEQ ID NO:166. The nucleotide sequence of another SLC25A45 reference mRNA molecule is set forth in SEQ ID NO:167. The nucleotide sequence of another SLC25A45 reference mRNA molecule is set forth in SEQ ID NO:168. The nucleotide sequence of another SLC25A45 reference mRNA molecule is set forth in SEQ ID NO:169. The nucleotide sequence of another SLC25A45 reference mRNA molecule is set forth in SEQ ID NO:170. The nucleotide sequence of another SLC25A45 reference mRNA molecule is set forth in SEQ ID NO:171. The nucleotide sequence of another SLC25A45 reference mRNA molecule is set forth in SEQ ID NO:172. The nucleotide sequence of another SLC25A45 reference mRNA molecule is set forth in SEQ ID NO:173. The nucleotide sequence of another SLC25A45 reference mRNA molecule is set forth in SEQ ID NO:174. The nucleotide sequence of another SLC25A45 reference mRNA molecule is set forth in SEQ ID NO:175. The nucleotide sequence of another SLC25A45 reference mRNA molecule is set forth in SEQ ID NO:176. The nucleotide sequence of another SLC25A45 reference mRNA molecule is set forth in SEQ ID NO:177. The nucleotide sequence of another SLC25A45 reference mRNA molecule is set forth in SEQ ID NO:178.

[0371] The nucleotide sequence of an SLC25A45 reference cDNA molecule is set forth in SEQ ID NO:179. The nucleotide sequence of another SLC25A45 reference cDNA molecule is set forth in SEQ ID NO:180. The nucleotide sequence of another SLC25A45 reference cDNA molecule is set forth in SEQ ID NO:181. The nucleotide sequence of another SLC25A45 reference cDNA molecule is set forth in SEQ ID NO:182. The nucleotide sequence of another SLC25A45 reference cDNA molecule is set forth in SEQ ID NO:183. The nucleotide sequence of another SLC25A45 reference cDNA molecule is set forth in SEQ ID NO:184. The nucleotide sequence of another SLC25A45 reference cDNA molecule is set forth in SEQ ID NO:185. The nucleotide sequence of another SLC25A45 reference cDNA molecule is set forth in SEQ ID NO:186. The nucleotide sequence of another SLC25A45 reference cDNA molecule is set forth in SEQ ID NO:187. The nucleotide sequence of another SLC25A45 reference cDNA molecule is set forth in SEQ ID NO:188. The nucleotide sequence of another SLC25A45 reference cDNA molecule is set forth in SEQ ID NO:189. The nucleotide sequence of another SLC25A45 reference cDNA molecule is set forth in SEQ ID NO:190. The nucleotide sequence of another SLC25A45 reference cDNA molecule is set forth in SEQ ID NO:191. The nucleotide sequence of another SLC25A45 reference cDNA molecule is set forth in SEQ ID NO:192. The nucleotide sequence of another SLC25A45 reference cDNA molecule is set forth in SEQ ID NO:193. The nucleotide sequence of another SLC25A45 reference cDNA molecule is set forth in SEQ ID NO:194. The nucleotide sequence of another SLC25A45 reference cDNA molecule is set forth in SEQ ID NO:195. The nucleotide sequence of another SLC25A45 reference cDNA molecule is set forth in SEQ ID NO:196. The nucleotide sequence of another SLC25A45 reference cDNA molecule is set forth in SEQ ID NO:197.

[0372] The amino acid sequence of an SLC25A45 reference polypeptide is set forth in SEQ ID NO:198, and is 288 amino acids in length. The amino acid sequence of another SLC25A45 reference polypeptide is set forth in SEQ ID NO:199, and is 226 amino acids in length. The amino acid sequence of another SLC25A45 reference polypeptide is set forth in SEQ ID NO:200, and is 264 amino acids in length. The amino acid sequence of another SLC25A45 reference polypeptide is set forth in SEQ ID NO:201, and is 246 amino acids in length. The amino acid sequence of another SLC25A45 reference polypeptide is set forth in SEQ ID NO:202, and is 184 amino acids in length. The amino acid sequence of another SLC25A45 reference polypeptide is set forth in SEQ ID NO:203, and is 194 amino acids in length. The amino acid sequence of another SLC25A45 reference polypeptide is set forth in SEQ ID NO:204, and is 118 amino acids in length.

[0373] The nucleotide sequence of an SLC7A9 reference genomic nucleic acid molecule is set forth in SEQ ID NO:205 (encompassing chr19:32,830,511-32,869,767 in the GRCh38/hg38 human genome assembly).

[0374] The nucleotide sequence of an SLC7A9 reference mRNA molecule is set forth in SEQ ID NO:206. The nucleotide sequence of another SLC7A9 reference mRNA molecule is set forth in SEQ ID NO:207. The nucleotide sequence of another SLC7A9 reference mRNA molecule is set forth in SEQ ID NO:208. The nucleotide sequence of another SLC7A9 reference mRNA molecule is set forth in SEQ ID NO:209. The nucleotide sequence of another SLC7A9 reference mRNA molecule is set forth in SEQ ID NO:210. The nucleotide sequence of another SLC7A9 reference mRNA molecule is set forth in SEQ ID NO:211. The nucleotide sequence of another SLC7A9 reference mRNA molecule is set forth in SEQ ID NO:212. The nucleotide sequence of another SLC7A9 reference mRNA molecule is set forth in SEQ ID NO:213. The nucleotide sequence of another SLC7A9 reference mRNA molecule is set forth in SEQ ID NO:214. The nucleotide sequence of another SLC7A9 reference mRNA molecule is set forth in SEQ ID NO:215. The nucleotide sequence of another SLC7A9 reference mRNA molecule is set forth in SEQ ID NO:216.

[0375] The nucleotide sequence of an SLC7A9 reference cDNA molecule is set forth in SEQ ID NO:217. The nucleotide sequence of another SLC7A9 reference cDNA molecule is set forth in SEQ ID NO:218. The nucleotide sequence of another SLC7A9 reference cDNA molecule is set forth in SEQ ID NO:219. The nucleotide sequence of another SLC7A9 reference cDNA molecule is set forth in SEQ ID NO:220. The nucleotide sequence of another SLC7A9 reference cDNA molecule is set forth in SEQ ID NO:221. The nucleotide sequence of another SLC7A9 reference cDNA molecule is set forth in SEQ ID NO:222. The nucleotide sequence of another SLC7A9 reference cDNA molecule is set forth in SEQ ID NO:223. The nucleotide sequence of another SLC7A9 reference cDNA molecule is set forth in SEQ ID NO:224. The nucleotide sequence of another SLC7A9 reference cDNA molecule is set forth in SEQ ID NO:225. The nucleotide sequence of another SLC7A9 reference cDNA molecule is set forth in SEQ ID NO:226. The nucleotide sequence of another SLC7A9 reference cDNA molecule is set forth in SEQ ID NO:227.

[0376] The amino acid sequence of an SLC7A9 reference polypeptide is set forth in SEQ ID NO:228, and is 487 amino acids in length.

[0377] The genomic nucleic acid molecules, mRNA molecules, and cDNA molecules can be from any organism. For example, the genomic nucleic acid molecules, mRNA molecules, and cDNA molecules can be human or an ortholog from another organism, such as a non-human mammal, a rodent, a mouse, or a rat. It is understood that gene sequences within a population can vary due to polymorphisms such as single-nucleotide polymorphisms. The examples provided herein are only exemplary sequences. Other sequences are also possible.

[0378] Also provided herein are functional polynucleotides that can interact with the disclosed nucleic acid molecules. Examples of functional polynucleotides include, but are not limited to, antisense molecules, aptamers, ribozymes, triplex forming molecules, and external guide sequences. The functional polynucleotides can act as effectors, inhibitors, modulators, and stimulators of a specific activity possessed by a target molecule, or the functional polynucleotides can possess a de novo activity independent of any other molecules.

[0379] The isolated nucleic acid molecules disclosed herein can comprise RNA, DNA, or both RNA and DNA. The isolated nucleic acid molecules can also be linked or fused to a heterologous nucleic acid sequence, such as in a vector, or a heterologous label. For example, the isolated nucleic acid molecules disclosed herein can be within a vector or as an exogenous donor sequence comprising the isolated nucleic acid molecule and a heterologous nucleic acid sequence. The isolated nucleic acid molecules can also be linked or fused to a heterologous label. The label can be directly detectable (such as, for example, fluorophore) or indirectly detectable (such as, for example, hapten, enzyme, or fluorophore quencher). Such labels can be detectable by spectroscopic, photochemical, biochemical, immunochemical, or chemical means. Such labels include, for example, radiolabels, pigments, dyes, chromogens, spin labels, and fluorescent labels. The label can also be, for example, a chemiluminescent substance; a metal-containing substance; or an enzyme, where there occurs an enzyme-dependent secondary generation of signal. The term “label” can also refer to a “tag” or hapten that can bind selectively to a conjugated molecule such that the conjugated molecule, when added subsequently along with a substrate, is used to generate a detectable signal. For example, biotin can be used as a tag along with an avidin or streptavidin conjugate of horseradish peroxidate (HRP) to bind to the tag, and examined using a calorimetric substrate (such as, for example, tetramethylbenzidine (TMB)) or a fluorogenic substrate to detect the presence of HRP. Exemplary labels that can be used as tags to facilitate purification include, but are not limited to, myc, HA, FLAG or 3×FLAG, 6×his or polyhistidine, glutathione-S-transferase (GST), maltose binding protein, an epitope tag, or the Fc portion of immunoglobulin. Numerous labels include, for example, particles, fluorophores, haptens, enzymes and their calorimetric, fluorogenic and chemiluminescent substrates and other labels.

[0380] Percent identity (or percent complementarity) between particular stretches of nucleotide sequences within nucleic acid molecules or amino acid sequences within polypeptides can be determined routinely using BLAST programs (basic local alignment search tools) and PowerBLAST programs (Altschul et al., J. Mol. Biol., 1990, 215, 403-410; Zhang and Madden, Genome Res., 1997, 7, 649-656) or by using the Gap program (Wisconsin Sequence Analysis Package, Version 8 for Unix, Genetics Computer Group, University Research Park, Madison Wis.), using default settings, which uses the algorithm of Smith and Waterman (Adv. Appl. Math., 1981, 2, 482-489). Herein, if reference is made to percent sequence identity, the higher percentages of sequence identity are preferred over the lower ones.

[0381] As used herein, the phrase “corresponding to” or grammatical variations thereof when used in the context of the numbering of a particular nucleotide or nucleotide sequence or position refers to the numbering of a specified reference sequence when the particular nucleotide or nucleotide sequence is compared to a reference sequence (such as, for example, SEQ ID NO:1). In other words, the residue (such as, for example, nucleotide or amino acid) number or residue (such as, for example, nucleotide or amino acid) position of a particular polymer is designated with respect to the reference sequence rather than by the actual numerical position of the residue within the particular nucleotide or nucleotide sequence. For example, a particular nucleotide sequence can be aligned to a reference sequence by introducing gaps to optimize residue matches between the two sequences. In these cases, although the gaps are present, the numbering of the residue in the particular nucleotide or nucleotide sequence is made with respect to the reference sequence to which it has been aligned.

[0382] The nucleotide and amino acid sequences listed in the accompanying sequence listing are shown using standard letter abbreviations for nucleotide bases, and three-letter code for amino acids. The nucleotide sequences follow the standard convention of beginning at the 5′ end of the sequence and proceeding forward (i.e., from left to right in each line) to the 3′ end. Only one strand of each nucleotide sequence is shown, but the complementary strand is understood to be included by any reference to the displayed strand. The amino acid sequence follows the standard convention of beginning at the amino terminus of the sequence and proceeding forward (i.e., from left to right in each line) to the carboxy terminus.

[0383] The present disclosure also provides therapeutic agents that treat, prevent, or inhibit a kidney disease for use in the treatment and/or prevention of a kidney disease in a subject having: an ALDH1L1 variant genomic nucleic acid molecule encoding an ALDH1L1 predicted loss-of-function polypeptide; an ALDH1L1 variant mRNA molecule encoding an ALDH1L1 predicted loss-of-function polypeptide; or an ALDH1L1 variant cDNA molecule encoding an ALDH1L1 predicted loss-of-function polypeptide. Any of the therapeutic agents that treat, prevent, or inhibit a kidney disease described herein can be used in these methods.

[0384] The present disclosure also provides therapeutic agents that treat, prevent, or inhibit a kidney disease for use in the treatment and/or prevention of a kidney disease in a subject having: an ALDOB variant genomic nucleic acid molecule encoding an ALDOB predicted loss-of-function polypeptide; an ALDOB variant mRNA molecule encoding an ALDOB predicted loss-of-function polypeptide; or an ALDOB variant cDNA molecule encoding an ALDOB predicted loss-of-function polypeptide. Any of the therapeutic agents that treat, prevent, or inhibit a kidney disease described herein can be used in these methods.

[0385] The present disclosure also provides therapeutic agents that treat, prevent, or inhibit a kidney disease for use in the treatment and/or prevention of a kidney disease in a subject having: a G6PC variant genomic nucleic acid molecule encoding a G6PC predicted loss-of-function polypeptide; a G6PC variant mRNA molecule encoding a G6PC predicted loss-of-function polypeptide; or a G6PC variant cDNA molecule encoding a G6PC predicted loss-of-function polypeptide. Any of the therapeutic agents that treat, prevent, or inhibit a kidney disease described herein can be used in these methods.

[0386] The present disclosure also provides therapeutic agents that treat, prevent, or inhibit a kidney disease for use in the treatment and/or prevention of kidney disease in a subject having: an LRP2 variant genomic nucleic acid molecule encoding an LRP2 predicted loss-of-function polypeptide; an LRP2 variant mRNA molecule encoding an LRP2 predicted loss-of-function polypeptide; or an LRP2 variant cDNA molecule encoding an LRP2 predicted loss-of-function polypeptide. Any of the therapeutic agents that treat, prevent, or inhibit a kidney disease described herein can be used in these methods.

[0387] The present disclosure also provides therapeutic agents that treat, prevent, or inhibit a kidney disease for use in the treatment and/or prevention of a kidney disease in a subject having: an RPL3L variant genomic nucleic acid molecule encoding an RPL3L predicted loss-of-function polypeptide; an RPL3L variant mRNA molecule encoding an RPL3L predicted loss-of-function polypeptide; or an RPL3L variant cDNA molecule encoding an RPL3L predicted loss-of-function polypeptide. Any of the therapeutic agents that treat, prevent, or inhibit a kidney disease described herein can be used in these methods.

[0388] The present disclosure also provides therapeutic agents that treat, prevent, or inhibit a kidney disease for use in the treatment and/or prevention of a kidney disease in a subject having: an SLC25L45 variant genomic nucleic acid molecule encoding an SLC25L45 predicted loss-of-function polypeptide; an SLC25L45 variant mRNA molecule encoding an SLC25L45 predicted loss-of-function polypeptide; or an SLC25L45 variant cDNA molecule encoding an SLC25L45 predicted loss-of-function polypeptide. Any of the therapeutic agents that treat, prevent, or inhibit a kidney disease described herein can be used in these methods.

[0389] The present disclosure also provides therapeutic agents that treat, prevent, or inhibit a kidney disease for use in the treatment and/or prevention of a kidney disease in a subject having: an SLC7A9 variant genomic nucleic acid molecule encoding an SLC7A9 predicted loss-of-function polypeptide; an SLC7A9 variant mRNA molecule encoding an SLC7A9 predicted loss-of-function polypeptide; or an SLC7A9 variant cDNA molecule encoding an SLC7A9 predicted loss-of-function polypeptide. Any of the therapeutic agents that treat, prevent, or inhibit a kidney disease described herein can be used in these methods.

[0390] The present disclosure also provides uses of therapeutic agents that treat, prevent, or inhibit a kidney disease for use in the preparation of a medicament for treating and/or preventing a kidney disease in a subject having: an ALDH1L1 variant genomic nucleic acid molecule encoding an ALDH1L1 predicted loss-of-function polypeptide; an ALDH1L1 variant mRNA molecule encoding an ALDH1L1 predicted loss-of-function polypeptide; or an ALDH1L1 variant cDNA molecule encoding an ALDH1L1 predicted loss-of-function polypeptide. Any of the therapeutic agents that treat, prevent, or inhibit a kidney disease described herein can be used in these methods.

[0391] The present disclosure also provides uses of therapeutic agents that treat, prevent, or inhibit a kidney disease for use in the preparation of a medicament for treating and/or preventing a kidney disease in a subject having: an ALDOB variant genomic nucleic acid molecule encoding an ALDOB predicted loss-of-function polypeptide; an ALDOB variant mRNA molecule encoding an ALDOB predicted loss-of-function polypeptide; or an ALDOB variant cDNA molecule encoding an ALDOB predicted loss-of-function polypeptide. Any of the therapeutic agents that treat, prevent, or inhibit a kidney disease described herein can be used in these methods.

[0392] The present disclosure also provides uses of therapeutic agents that treat, prevent, or inhibit a kidney disease for use in the preparation of a medicament for treating and/or preventing a kidney disease in a subject having: a G6PC variant genomic nucleic acid molecule encoding a G6PC predicted loss-of-function polypeptide; a G6PC variant mRNA molecule encoding a G6PC predicted loss-of-function polypeptide; or a G6PC variant cDNA molecule encoding a G6PC predicted loss-of-function polypeptide. Any of the therapeutic agents that treat, prevent, or inhibit a kidney disease described herein can be used in these methods.

[0393] The present disclosure also provides uses of therapeutic agents that treat, prevent, or inhibit a kidney disease for use in the preparation of a medicament for treating and/or preventing a kidney disease in a subject having: an LRP2 variant genomic nucleic acid molecule encoding an LRP2 predicted loss-of-function polypeptide; an LRP2 variant mRNA molecule encoding an LRP2 predicted loss-of-function polypeptide; or an LRP2 variant cDNA molecule encoding an LRP2 predicted loss-of-function polypeptide. Any of the therapeutic agents that treat, prevent, or inhibit a kidney disease described herein can be used in these methods.

[0394] The present disclosure also provides uses of therapeutic agents that treat, prevent, or inhibit a kidney disease for use in the preparation of a medicament for treating and/or preventing a kidney disease in a subject having: an RPL3L variant genomic nucleic acid molecule encoding an RPL3L predicted loss-of-function polypeptide; an RPL3L variant mRNA molecule encoding an RPL3L predicted loss-of-function polypeptide; or an RPL3L variant cDNA molecule encoding an RPL3L predicted loss-of-function polypeptide. Any of the therapeutic agents that treat, prevent, or inhibit a kidney disease described herein can be used in these methods.

[0395] The present disclosure also provides uses of therapeutic agents that treat, prevent, or inhibit a kidney disease for use in the preparation of a medicament for treating and/or preventing a kidney disease in a subject having: an SLC25L45 variant genomic nucleic acid molecule encoding an SLC25L45 predicted loss-of-function polypeptide; an SLC25L45 variant mRNA molecule encoding an SLC25L45 predicted loss-of-function polypeptide; or an SLC25L45 variant cDNA molecule encoding an SLC25L45 predicted loss-of-function polypeptide. Any of the therapeutic agents that treat, prevent, or inhibit a kidney disease described herein can be used in these methods.

[0396] The present disclosure also provides uses of therapeutic agents that treat, prevent, or inhibit a kidney disease for use in the preparation of a medicament for treating and/or preventing a kidney disease in a subject having: an SLC7A9 variant genomic nucleic acid molecule encoding an SLC7A9 predicted loss-of-function polypeptide; an SLC7A9 variant mRNA molecule encoding an SLC7A9 predicted loss-of-function polypeptide; or an SLC7A9 variant cDNA molecule encoding an SLC7A9 predicted loss-of-function polypeptide. Any of the therapeutic agents that treat, prevent, or inhibit a kidney disease described herein can be used in these methods.

[0397] The present disclosure also provides ALDH1L1 inhibitors for use in the treatment and/or prevention of a kidney disease in a subject that is: ALDH1L1 reference, or has: an ALDH1L1 variant genomic nucleic acid molecule encoding an ALDH1L1 predicted loss-of-function polypeptide; an ALDH1L1 variant mRNA molecule encoding an ALDH1L1 predicted loss-of-function polypeptide; or an ALDH1L1 variant cDNA molecule encoding an ALDH1L1 predicted loss-of-function polypeptide. Any of the ALDH1L1 inhibitors described herein can be used in these methods.

[0398] The present disclosure also provides ALDOB inhibitors for use in the treatment and/or prevention of a kidney disease in a subject that is: ALDOB reference, or has: an ALDOB variant genomic nucleic acid molecule encoding an ALDOB predicted loss-of-function polypeptide; an ALDOB variant mRNA molecule encoding an ALDOB predicted loss-of-function polypeptide; or an ALDOB variant cDNA molecule encoding an ALDOB predicted loss-of-function polypeptide. Any of the ALDOB inhibitors described herein can be used in these methods.

[0399] The present disclosure also provides G6PC inhibitors for use in the treatment and/or prevention of a kidney disease in a subject that is: G6PC reference, or has: a G6PC variant genomic nucleic acid molecule encoding a G6PC predicted loss-of-function polypeptide; a G6PC variant mRNA molecule encoding a G6PC predicted loss-of-function polypeptide; or a G6PC variant cDNA molecule encoding a G6PC predicted loss-of-function polypeptide. Any of the G6PC inhibitors described herein can be used in these methods.

[0400] The present disclosure also provides LRP2 inhibitors for use in the treatment and/or prevention of a kidney disease in a subject that is: LRP2 reference, or has: an LRP2 variant genomic nucleic acid molecule encoding an LRP2 predicted loss-of-function polypeptide; an LRP2 variant mRNA molecule encoding an LRP2 predicted loss-of-function polypeptide; or an LRP2 variant cDNA molecule encoding an LRP2 predicted loss-of-function polypeptide. Any of the LRP2 inhibitors described herein can be used in these methods.

[0401] The present disclosure also provides RPL3L inhibitors for use in the treatment and/or prevention of a kidney disease in a subject that is: RPL3L reference, or has: an RPL3L variant genomic nucleic acid molecule encoding an RPL3L predicted loss-of-function polypeptide; an RPL3L variant mRNA molecule encoding an RPL3L predicted loss-of-function polypeptide; or an RPL3L variant cDNA molecule encoding an RPL3L predicted loss-of-function polypeptide. Any of the RPL3L inhibitors described herein can be used in these methods.

[0402] The present disclosure also provides SLC25A45 inhibitors for use in the treatment and/or prevention of a kidney disease in a subject that is: SLC25A45 reference, or has: an SLC25A45 variant genomic nucleic acid molecule encoding an SLC25A45 predicted loss-of-function polypeptide; an SLC25A45 variant mRNA molecule encoding an SLC25A45 predicted loss-of-function polypeptide; or an SLC25A45 variant cDNA molecule encoding an SLC25A45 predicted loss-of-function polypeptide. Any of the SLC25A45 inhibitors described herein can be used in these methods.

[0403] The present disclosure also provides SLC7A9 inhibitors for use in the treatment and/or prevention of a kidney disease in a subject that is: SLC7A9 reference, or has: an SLC7A9 variant genomic nucleic acid molecule encoding an SLC7A9 predicted loss-of-function polypeptide; an SLC7A9 variant mRNA molecule encoding an SLC7A9 predicted loss-of-function polypeptide; or an SLC7A9 variant cDNA molecule encoding an SLC7A9 predicted loss-of-function polypeptide. Any of the SLC7A9 inhibitors described herein can be used in these methods.

[0404] The present disclosure also provides uses of ALDH1L1 inhibitors in the preparation of a medicament for treating and/or preventing a kidney disease in a subject that is: ALDH1L1 reference, or has: an ALDH1L1 variant genomic nucleic acid molecule encoding an ALDH1L1 predicted loss-of-function polypeptide; an ALDH1L1 variant mRNA molecule encoding an ALDH1L1 predicted loss-of-function polypeptide; or an ALDH1L1 variant cDNA molecule encoding an ALDH1L1 predicted loss-of-function polypeptide. Any of the ALDH1L1 inhibitors described herein can be used in these methods.

[0405] The present disclosure also provides uses of ALDOB inhibitors in the preparation of a medicament for treating and/or preventing a kidney disease in a subject that is: ALDOB reference, or has: an ALDOB variant genomic nucleic acid molecule encoding an ALDOB predicted loss-of-function polypeptide; an ALDOB variant mRNA molecule encoding an ALDOB predicted loss-of-function polypeptide; or an ALDOB variant cDNA molecule encoding an ALDOB predicted loss-of-function polypeptide. Any of the ALDOB inhibitors described herein can be used in these methods.

[0406] The present disclosure also provides G6PC inhibitors for use in the preparation of a medicament for treating and/or preventing a kidney disease in a subject that is: a G6PC variant genomic nucleic acid molecule encoding a G6PC predicted loss-of-function polypeptide; a G6PC variant mRNA molecule encoding a G6PC predicted loss-of-function polypeptide; or a G6PC variant cDNA molecule encoding a G6PC predicted loss-of-function polypeptide. Any of the G6PC inhibitors described herein can be used in these methods.

[0407] The present disclosure also provides LRP2 inhibitors for use in the preparation of a medicament for treating and/or preventing a kidney disease in a subject that is: an LRP2 variant genomic nucleic acid molecule encoding an LRP2 predicted loss-of-function polypeptide; an LRP2 variant mRNA molecule encoding an LRP2 predicted loss-of-function polypeptide; or an LRP2 variant cDNA molecule encoding an LRP2 predicted loss-of-function polypeptide. Any of the LRP2 inhibitors described herein can be used in these methods.

[0408] The present disclosure also provides RPL3L inhibitors for use in the preparation of a medicament for treating and/or preventing a kidney disease in a subject that is: an RPL3L variant genomic nucleic acid molecule encoding an RPL3L predicted loss-of-function polypeptide; an RPL3L variant mRNA molecule encoding an RPL3L predicted loss-of-function polypeptide; or an RPL3L variant cDNA molecule encoding an RPL3L predicted loss-of-function polypeptide. Any of the RPL3L inhibitors described herein can be used in these methods.

[0409] The present disclosure also provides SLC25A45 inhibitors for use in the preparation of a medicament for treating and/or preventing a kidney disease in a subject that is: an SLC25A45 variant genomic nucleic acid molecule encoding an SLC25A45 predicted loss-of-function polypeptide; an SLC25A45 variant mRNA molecule encoding an SLC25A45 predicted loss-of-function polypeptide; or an SLC25A45 variant cDNA molecule encoding an SLC25A45 predicted loss-of-function polypeptide. Any of the SLC25A45 inhibitors described herein can be used in these methods.

[0410] The present disclosure also provides SLC7A9 inhibitors for use in the preparation of a medicament for treating and/or preventing a kidney disease in a subject that is: an SLC7A9 variant genomic nucleic acid molecule encoding an SLC7A9 predicted loss-of-function polypeptide; an SLC7A9 variant mRNA molecule encoding an SLC7A9 predicted loss-of-function polypeptide; or an SLC7A9 variant cDNA molecule encoding an SLC7A9 predicted loss-of-function polypeptide. Any of the SLC7A9 inhibitors described herein can be used in these methods.

[0411] All patent documents, websites, other publications, accession numbers and the like cited above or below are incorporated by reference in their entirety for all purposes to the same extent as if each individual item were specifically and individually indicated to be so incorporated by reference. If different versions of a sequence are associated with an accession number at different times, the version associated with the accession number at the effective filing date of this application is meant. The effective filing date means the earlier of the actual filing date or filing date of a priority application referring to the accession number if applicable. Likewise, if different versions of a publication, website or the like are published at different times, the version most recently published at the effective filing date of the application is meant unless otherwise indicated. Any feature, step, element, embodiment, or aspect of the present disclosure can be used in combination with any other feature, step, element, embodiment, or aspect unless specifically indicated otherwise. Although the present disclosure has been described in some detail by way of illustration and example for purposes of clarity and understanding, it will be apparent that certain changes and modifications may be practiced within the scope of the appended claims.

[0412] The following examples are provided to describe the embodiments in greater detail. They are intended to illustrate, not to limit, the claimed embodiments. The following examples provide those of ordinary skill in the art with a disclosure and description of how the compounds, compositions, articles, devices and/or methods described herein are made and evaluated, and are intended to be purely exemplary and are not intended to limit the scope of any claims. Efforts have been made to ensure accuracy with respect to numbers (such as, for example, amounts, temperature, etc.), but some errors and deviations may be accounted for. Unless indicated otherwise, parts are parts by weight, temperature is in ° C. or is at ambient temperature, and pressure is at or near atmospheric.

### EXAMPLES

### Example 1: Identification of Genes in which Loss-of-Function or Missense Variants are Associated with Increased eGFR

[0413] To identify genetic factors contributing to predisposition for or protection against chronic liver disease, exome sequencing was performed in 545,740 participants from the UK Biobank cohort (UKB) and Geisinger Health System DiscovEHR study (GHS). For each gene in the genome, associations with estimated glomerular filtration rate (eGFR), a widely used biomarker of kidney function in which higher levels indicate better function, were estimated for the burden of rare loss-of-function and missense variants identified by exome sequencing. Statistically significant findings were subsequently evaluated for their association with clinical diagnoses of kidney disease in UKB and GHS.

[0414] In the exome-wide analysis, the burden of rare (alternative allele frequency (AAF)<1%) predicted loss-of-function (pLOF) or missense genetic variants in seven genes was strongly associated with increased eGFR at the exome-wide level of statistical significance (p<3.6×10⁻⁷, a Bonferroni correction for 20,000 genes and seven variant selection models, Table 8).

TABLE 8
Rare pLOF or missense variants in genes associated with increased eGFR levels

| | | Per allele beta | Per allele beta | | Genotype counts, | AAF, |
|---|---|---|---|---|---|---|
| | Genetic | (95% Cl), SD | (95% Cl), mL/min | | RR\|RA\|AA | fraction |
| Gene | exposure | units | units | P-value | genotypes | of 1 |
| ALDH1L1 | pLOF or | 0.05 | 0.89 | 1.39E−16 | 529024\|16679\|37 | 0.0153 |
| | missense (5/5) | (0.04, 0.07) | (0.68, 1.11) | | | |
| | variants with | | | | | |
| | AAF <1% | | | | | |
| ALDOB | pLOF or | 0.06 | 1.03 | 1.85E−14 | 534968\|10752\|20 | 0.0099 |
| | missense (1+/5) | (0.05, 0.08) | (0.77, 1.29) | | | |
| | variants with | | | | | |
| | AAF <1% | | | | | |
| G6PC | pLOF or | 0.12 | 2.03 | 4.07E−12 | 543603\|2137\|0 | 0.0020 |
| | missense (5/5) | (0.09, 0.15) | (1.46, 2.61) | | | |
| | variants with | | | | | |
| | AAF <1% | | | | | |
| LRP2 | pLOF or | 0.05 | 0.8 | 5.15E−30 | 501161\|44510\|69 | 0.0409 |
| | missense | (0.04, 0.06) | (0.66, 0.94) | | | |
| | variants with | | | | | |
| | AAF <0.1% | | | | | |
| LRP2 | pLOF or | 0.04 | 0.69 | 2.30E−38 | 466144\|79393\|203 | 0.0731 |
| | missense (1+/5) | (0.03, 0.05) | (0.59, 0.79) | | | |
| | variants with | | | | | |
| | AAF <1% | | | | | |
| RPL3L | pLOF or | 0.04 | 0.64 | 1.34E−37 | 460204\|84156\|1380 | 0.0796 |
| | missense (5/5) | (0.03, 0.04) | (0.54, 0.74) | | | |
| | variants with | | | | | |
| | AAF <5% | | | | | |
| SLC25A45 | pLOF or | 0.05 | 0.86 | 1.33E−39 | 499245\|45844\|651 | 0.0432 |
| | missense | (0.04, 0.06) | (0.73, 0.99) | | | |
| | variants with | | | | | |
| | AAF <5% | | | | | |
| SLC7A9 | pLOF or | 0.08 | 1.33 | 9.22E−28 | 532725\|12997\|18 | 0.0119 |
| | missense | (0.06, 0.09) | (1.1, 1.57) | | | |
| | variants with | | | | | |
| | AAF <1% | | | | | |

RR indicates the number of individuals in the population studies carrying no missense variants in the specified gene; RA indicates the number of individuals carrying one or more missense variants of a single allele of the specified gene; AA indicates the number of individuals carrying one or more missense variants in both alleles of the specified gene; pLOF indicates predicted loss of function; missense (1/5) and missense (5/5) indicate missense variant predicted to be deleterious by at least 1 out of 5 or 5 out of 5, respectively, in silico prediction algorithms; AAF indicates alternate allele frequency.

[0415] The top 1-3 specific genetic variants in seven genes strongly associated with increased eGFR are listed in Table 9.

TABLE 9
Rare pLOF or missense variants in genes associated with increased eGFR levels

| | Top variant ID | | Per allele | | | | |
|---|---|---|---|---|---|---|---|
| | (Chromosome: | Per allele | beta | | Genotype | | % of |
| | Position: | beta (95% | (95% Cl), | | counts, RR\| | AAF, | individuals |
| Genetic | RA:AA) | Cl), SD | min/mL | | RA\|AA | fraction | carrying |
| exposure | Top variant RSID | units | units | P-value | genotypes | of 1 | variant |
| ALDH1L1 | 3:126160912:C:T | 0.06 | 0.98 | 1.3E−09 | 538,354\| | 0.00679 | 1.35% |
| burden of | rs143122118 | [0.04, 0.08] | [0.66, 1.29] | | 7,351\|28 | | |
| pLOF or | 3:126110055:G:C | 0.24 | 4.05 | 1.3E−05 | 525,051\| | 0.00020 | 0.04% |
| missense | rs775766256 | [0.13, 0.35] | [2.23, 5.87] | | 213\|0 | | |
| variants | | | | | | | |
| with 5 | | | | | | | |
| deleterious | | | | | | | |
| predictions | | | | | | | |
| with | | | | | | | |
| AAF <1% | | | | | | | |
| ALDOB | 9:101427574:C:G | 0.07 | 1.15 | 4.7E−10 | 537,930\| | 0.00520 | 1.04% |
| burden of | rs1800546 | [0.05, 0.09] | [0.79, 1.51] | | 5,629\|13 | | |
| pLOF or | 9:101426570:C:A | −3.28 | −55.5 | 1.1E−04 | 411,090\| | 1.2E−06 | 0.0002% |
| missense | NA | [−4.94, −1.62] | [−83.5, −27.4] | | 1/0 | | |
| variants | 9:101429913:G:A | 0.16 | 2.7 | 0.0023 | 525,019\| | 0.00023 | 0.05% |
| with 1+ | rs201397971 | [0.06, 0.26] | [0.96, 4.44] | | 243\|0 | | |
| deleterious | | | | | | | |
| prediction | | | | | | | |
| with | | | | | | | |
| AAF <1% | | | | | | | |
| G6PC | 17:42900952:TC:T | 0.15 | 2.59 | 0.0021 | 524,994\| | 0.00025 | 0.05% |
| burden of | rs1251265849 | [0.06, 0.25] | [0.94, 4.24] | | 265\|0 | | |
| pLOF or | 17:42911417:G:T | −2.59 | −43.7 | 0.0023 | 411,090\| | 1.2E−06 | 0.0002% |
| missense | rs746978011 | [−4.25, −0.93] | [−71.8, −15.7] | | 1\|0 | | |
| variants | 17:42903947:C:T | 0.11 | 1.89 | 0.0077 | 545,379\| | 0.00033 | 0.07% |
| with 5 | rs1801175 | [0.03, 0.19] | [0.5, 3.27] | | 358\|0 | | |
| deleterious | 17:42900910:G:C | 0.96 | 16.3 | 0.017 | 525,261\| | 3.8E−06 | 0.0008% |
| predictions | NA | [0.17, 1.75] | [2.9, 29.7] | | 4\|0 | | |
| with | 17:42903998:C:T | −2.02 | −34.2 | 0.017 | 411,090\| | 1.2E−06 | 0.0002% |
| AAF <1% | rs1157674386 | [−3.68, −0.36] | [−62.2, −6.1] | | 1\|0 | | |
| | 17:42911391:C:T | 0.09 | 1.6 | 0.023 | 534,712\| | 0.00036 | 0.07% |
| | rs80356487 | [0.01, 0.18] | [0.22, 2.99] | | 382\|0 | | |
| LRP2 | 2:169174132:A:G | 0.70 | 11.8 | 1.0E−09 | 411,036\| | 0.00007 | 0.01% |
| burden of | NA | [0.47, 0.92] | [8.0, 15.6] | | 55\|0 | | |
| pLOF or | 2:169170643:T:A | 0.19 | 3.16 | 2.1E−08 | 533,193\| | 0.00057 | 0.11% |
| missense | rs200475391 | [0.12, 0.25] | [2.06, 4.27] | | 604\|0 | | |
| variants | | | | | | | |
| with | | | | | | | |
| AAF <0.1% | | | | | | | |
| LRP2 | 2:169173147:C:T | 0.10 | 1.66 | 5.8E−23 | 537,143\| | 0.00599 | 1.19% |
| burden of | rs34355135 | [0.08, 0.12] | [1.33, 1.99] | | 6,463\|24 | | |
| pLOF or | 2:169174132:A:G | 0.70 | 11.8 | 1.0E−09 | 411,036\| | 0.00007 | 0.01% |
| missense | NA | [0.47, 0.92] | [8.0, 15.6] | | 55\|0 | | |
| variants | 2:169170643:T:A | 0.19 | 3.2 | 2.1E−08 | 533,193\| | 0.00057 | 0.11% |
| with 1 | rs200475391 | [0.12, 0.25] | [2.1, 4.2] | | 604\|0 | | |
| deleterious | | | | | | | |
| prediction | | | | | | | |
| with | | | | | | | |
| AAF <1% | | | | | | | |
| RPL3L | 16:1947003:C:T | 0.04 | 0.76 | 8.2E−23 | 513,157\| | 0.03027 | 5.95% |
| burden of | rs113956264 | [0.04, 0.05] | [0.61, 0.9] | | 31,911\|563 | | |
| pLOF or | 16:1953015:G:A | 0.03 | 0.42 | 2.3E−09 | 507,991\| | 0.03523 | 6.91% |
| missense | rs140185678 | [0.02, 0.03] | [0.29, 0.56] | | 36,960\|744 | | |
| variants | | | | | | | |
| with 5 | | | | | | | |
| deleterious | | | | | | | |
| predictions | | | | | | | |
| with | | | | | | | |
| AAF <5% | | | | | | | |
| SLC25A45 | 11:65376421:G:A | 0.05 | 0.85 | 2.7E−30 | 508,523\| | 0.03282 | 6.45% |
| burden of | rs34400381 | [0.04, 0.06] | [0.7, 0.99] | | 34,461\|611 | | |
| pLOF or | 11:65379542:C:T | 0.06 | 0.93 | 2.3E−08 | 538,745\| | 0.00642 | 1.28% |
| missense | rs78829599 | [0.04, 0.07] | [0.61, 1.26] | | 6,949\|30 | | |
| variants | | | | | | | |
| with | | | | | | | |
| AAF <5% | | | | | | | |
| SLC7A9 | 19:32862521:C:T | 0.08 | 1.43 | 7.7E−14 | 538,325\| | 0.00487 | 0.97% |
| burden of | rs79389353 | [0.06, 0.11] | [1.05, 1.8] | | 5,268\|13 | | |
| pLOF or | 19:32864261:C:T | 0.15 | 2.47 | 1.8E−06 | 542,927\| | 0.00065 | 0.13% |
| missense | rs121908480 | [0.09, 0.21] | [1.46, 3.49] | | 700\|2 | | |
| variants | | | | | | | |
| with | | | | | | | |
| AAF <1% | | | | | | | |

[0416] The effect estimate of the burden of pLOF variants in each of these seven genes was directionally consistent with the burden of pLOF or any missense variants (see, FIG. 1), suggesting that the majority of rare missense variants included in the analysis result in a loss-of-function. Hence, these associations are consistent with loss-of-function in these genes.

### Example 2: Identification of Genes in which Loss-of-Function or Missense Variant is Associated with Protection Against Kidney Disease

[0417] The association of rare pLOF or missense variants in these seven genes with kidney disease outcomes was estimated. The burdens of rare pLOF or missense variants were associated with protection against any kidney disease (a broadly-defined composite outcome including kidney diseases of different types and etiology), any chronic kidney disease including or excluding microalbuminuria, later stages of chronic kidney disease such as stage 3 or greater, or stage 5 or greater, and severe kidney disease including end-stage renal disease or renal replacement therapy (Table 10). Heterozygous carriers of these genetic variants had 7% to 47% lower odds of kidney disease compared to non-carriers. Therefore, loss-of-function or deleterious missense variation in these genes is associated with protection against various types of kidney disease in humans.

TABLE 10
Association of any missense, predicted deleterious missense variants or predicted loss of function
variants in protective genes with any kidney disease, any chronic kidney disease, chronic kidney
disease stage 3+ or 5+, renal replacement therapy or end-stage renal disease in UKB and GHS

| Genetic exposure | Outcome | Per allele odds ratio (95% CI) | | P-value |
|---|---|---|---|---|
| ALDH1L1 pLOF or | Any kidney disease | 0.93 | (0.88, 0.98) | 0.005 |
| missense (5/5) | CKD, any | 0.88 | (0.82, 0.96) | 0.002 |
| variants with | CKD, any including | 0.93 | (0.87, 0.99) | 0.017 |
| AAF < 1% | microalbuminuria | | | |
| | CKD, stage 3+ | 0.87 | (0.79, 0.95) | 0.002 |
| | Renal replacement therapy | 0.82 | (0.69, 0.97) | 0.024 |
| ALDOB pLOF or | CKD, any | 0.85 | (0.77, 0.94) | 0.001 |
| missense (1+/5) | CKD, stage 3+ | 0.88 | (0.78, 0.98) | 0.019 |
| variants with | | | | |
| AAF < 1% | | | | |
| G6PC pLOF or | Any kidney disease | 0.86 | (0.74, 0.99) | 0.031 |
| missense (5/5) | CKD, any | 0.74 | (0.6, 0.91) | 0.004 |
| variants with | CKD, any including | 0.82 | (0.69, 0.97) | 0.017 |
| AAF < 1% | microalbuminuria | | | |
| | CKD, stage 3+ | 0.74 | (0.59, 0.93) | 0.008 |
| | CKD, stage 5+ | 0.55 | (0.32, 0.94) | 0.027 |
| | Renal replacement therapy | 0.56 | (0.36, 0.87) | 0.009 |
| | End stage renal disease | 0.53 | (0.3, 0.91) | 0.023 |
| LRP2 pLOF or | Any kidney disease | 0.95 | (0.92, 0.97) | 6E−05 |
| missense (1+/5) | CKD, any | 0.89 | (0.86, 0.93) | 4E−09 |
| variants with | CKD, stage 3+ | 0.88 | (0.85, 0.92) | 1E−08 |
| AAF < 1% | | | | |
| LRP2 pLOF or | CKD, stage 5+ | 0.83 | (0.72, 0.96) | 0.010 |
| missense variants | Renal replacement therapy | 0.85 | (0.77, 0.95) | 0.003 |
| with AAF < 0.1% | End stage renal disease | 0.84 | (0.73, 0.97) | 0.015 |
| RPL3L pLOF or | Any kidney disease | 0.97 | (0.95, 0.99) | 0.011 |
| missense (5/5) | CKD, any | 0.95 | (0.92, 0.99) | 0.005 |
| variants with | CKD, stage 3+ | 0.93 | (0.89, 0.96) | 2E−04 |
| AAF < 5% | CKD, stage 5+ | 0.90 | (0.81, 0.99) | 0.039 |
| SLC25A45 pLOF or | CKD, any | 0.91 | (0.87, 0.95) | 6E−05 |
| missense variants | CKD, any including | 0.94 | (0.91, 0.98) | 0.002 |
| with AAF < 5% | microalbuminuria | | | |
| | CKD, stage 3+ | 0.89 | (0.84, 0.94) | 1E−05 |
| SLC7A9 pLOF or | Any kidney disease | 0.90 | (0.85, 0.96) | 5E−04 |
| missense variants | CKD, any | 0.88 | (0.81, 0.96) | 0.005 |
| with AAF < 1% | CKD, any including | 0.90 | (0.84, 0.96) | 0.002 |
| | microalbuminuria | | | |
| | CKD, stage 3+ | 0.84 | (0.76, 0.92) | 4E−04 |

| | | Genotype counts, | Genotype counts, | AAF, |
|---|---|---|---|---|
| | | RR \| RA \| AA | RR \| RA \| AA | Fraction |
| Genetic exposure | Outcome | genotypes in cases | genotypes in controls | of 1 |
| ALDH1L1 pLOF or | Any kidney disease | 82105 \| 2424 \| 4 | 211734 \| 6963 \| 20 | 0.0156 |
| missense (5/5) | CKD, any | 39790 \| 1106 \| 0 | 210814 \| 6941 \| 20 | 0.0156 |
| variants with | CKD, any including | 57948 \| 1700 \| 2 | 211734 \| 6963 \| 20 | 0.0156 |
| AAF < 1% | microalbuminuria | | | |
| | CKD, stage 3+ | 34106 \| 936 \| 0 | 213468 \| 7003 \| 20 | 0.0156 |
| | Renal replacement therapy | 4893 \| 132 \| 0 | 213345 \| 6997 \| 20 | 0.0159 |
| ALDOB pLOF or | CKD, any | 40165 \| 731 \| 0 | 213354 \| 4415 \| 6 | 0.0100 |
| missense (1+/5) | CKD, stage 3+ | 34418 \| 624 \| 0 | 215988 \| 4496 \| 7 | 0.0100 |
| variants with | | | | |
| AAF < 1% | | | | |
| G6PC pLOF or | Any kidney disease | 83952 \| 350 \| 0 | 216855 \| 920 \| 0 | 0.0021 |
| missense (5/5) | CKD, any | 40723 \| 173 \| 0 | 216855 \| 920 \| 0 | 0.0021 |
| variants with | CKD, any including | 59217 \| 241 \| 0 | 216855 \| 920 \| 0 | 0.0021 |
| AAF < 1% | microalbuminuria | | | |
| | CKD, stage 3+ | 34888 \| 154 \| 0 | 219564 \| 927 \| 0 | 0.0021 |
| | CKD, stage 5+ | 3135 \| 8 \| 0 | 219564 \| 927 \| 0 | 0.0021 |
| | Renal replacement therapy | 4999 \| 10 \| 0 | 217799 \| 915 \| 0 | 0.0021 |
| | End stage renal disease | 2859 \| 6 \| 0 | 217924 \| 919 \| 0 | 0.0021 |
| LRP2 pLOF or | Any kidney disease | 72228 \| 12262 \| 43 | 185697 \| 32917 \| 103 | 0.0750 |
| missense (1+/5) | CKD, any | 35073 \| 5805 \| 18 | 184858 \| 32814 \| 103 | 0.0751 |
| variants with | CKD, stage 3+ | 30073 \| 4954 \| 15 | 187145 \| 33239 \| 107 | 0.0752 |
| AAF < 1% | | | | |
| LRP2 pLOF or | CKD, stage 5+ | 2919 \| 224 \| 0 | 201616 \| 18837 \| 38 | 0.0428 |
| missense variants | Renal replacement | 4640 \| 368 \| 1 | 200187 \| 18491 \| 36 | 0.0423 |
| with AAF < 0.1% | therapy | | | |
| | End stage renal disease | 2663 \| 202 \| 0 | 200301 \| 18506 \| 36 | 0.0424 |
| RPL3L pLOF or | Any kidney disease | 71392 \| 12936 \| 205 | 183811 \| 34299 \| 607 | 0.0806 |
| missense (5/5) | CKD, any | 34590 \| 6208 \| 98 | 182960 \| 34208 \| 607 | 0.0808 |
| variants with | CKD, stage 3+ | 29718 \| 5239 \| 85 | 185288 \| 34588 \| 615 | 0.0807 |
| AAF < 5% | CKD, stage 5+ | 2694 \| 442 \| 7 | 185288 \| 34588 \| 615 | 0.0811 |
| SLC25A45 pLOF or | CKD, any | 37702 \| 3154 \| 40 | 198654 \| 18846 \| 275 | 0.0437 |
| missense variants | CKD, any including | 54791 \| 4786 \| 73 | 199557 \| 18884 \| 276 | 0.0438 |
| with AAF < 5% | microalbuminuria | | | |
| | CKD, stage 3+ | 32371 \| 2639 \| 32 | 201211 \| 19003 \| 277 | 0.0436 |
| SLC7A9 pLOF or | Any kidney disease | 82566 \| 1962 \| 5 | 213183 \| 5525 \| 9 | 0.0124 |
| missense variants | CKD, any | 39958 \| 935 \| 3 | 212284 \| 5482 \| 9 | 0.0125 |
| with AAF < 1% | CKD, any including | 58247 \| 1400 \| 3 | 213183 \| 5525 \| 9 | 0.0125 |
| | microalbuminuria | | | |
| | CKD, stage 3+ | 34269 \| 771 \| 2 | 214856 \| 5627 \| 8 | 0.0126 |

RR indicates the number of individuals in the population studies carrying no missense variants; RA indicates the number of individuals carrying one or more missense variants of a single allele of the specified gene; AA indicates the number of individuals carrying one or more missense variants in both alleles of the specified gene; pLOF indicates predicted loss of function; missense (1+/5) and missense (5/5) indicate missense variant predicted to be deleterious by at least 1 out of 5 or 5 out of 5, respectively, in silico prediction algorithms; AAF indicates alternate allele frequency.

### Example 3: General Methodology

### Participating Cohorts:

[0418] Genetic association studies were performed in the United Kingdom (UK) Biobank (UKB) cohort (Sudlow et al., PLoS Med, 2015, 12, e1001779) and the DiscoverEHR cohort from the Geisinger Health System (GHS) MyCode Community Health Initiative (Carey et al., Genet. Med., 2016, 18, 906-13). The UKB is a population-based cohort study of people aged between 40 and 69 years recruited through 22 testing centers in the UK between 2006-2010. Over 430,000 participants from UKB with available whole-exome sequencing and clinical phenotype data were included. The GHS MyCode study Community Health Initiative is a health system-based cohort of patients from Central and Eastern Pennsylvania (USA) recruited in 2007-2019. Over 130,000 European ancestry participants from GHS with available whole-exome sequencing and clinical phenotype data were included.

### Phenotype Definitions:

[0419] eGFR was calculated from clinical laboratory measurements for creatinine extracted from electronic health records (EHRs) of participants from GHS. Median values were calculated for all participants with two or more measurements. In UKB, eGFR was calculated from creatinine measured by IFCC (International Federation of Clinical Chemistry) analysis on a Beckman Coulter AU5800 at the baseline visit of the study. In UKB, urine albumin:creatinine ratio (UACR) was derived from creatinine measured by enzymatic analysis and albumin measured by immunoturbidimetric analysis on a Beckman Coulter AU5400 on spot urine measured at the baseline visit of the study. Prior to genetic association analysis, continuous phenotype values were transformed by the inverse standard normal function, applied within each ancestry group and separately in men and women. Kidney disease outcomes were defined according to the International Classification of Diseases Tenth Revision (ICD-10) and read codes stored in EHRs. Self-reported disease status was used when available. Office of Population Censuses and Surveys Classification of Interventions and Procedures version 4 (OPCS4) codes were used for medical procedures in UKB.

[0420] Individuals with kidney diseases were identified as described in Table 11, combining EHR records, self-reports and eGFR and UACR measurements.

TABLE 11
Definitions of kidney disease and outcomes in UKB and GHS cohort

| | | Control definition |
|---|---|---|
| Kidney | Case definition | Participants were excluded from the control |
| disease | Participants were included as a case if they met | population for all kidney disease outcomes |
| outcome | any of the criteria specific to each disease | if they met any of the following criteria |
| Any kidney | ICD10: | ICD10: |
| disease | N00, N01, N02, N03, N04, N05, N06, N07, N08, N10, N11, | N00, N01, N02, N03, N04, N05, N06, N07, N08, N10, |
| | N12, N13, N14, N15, N16, N17, N18, N19, N25, N26, N27, | N11, N12, N13, N14, N15, N16, N17, N18, N19, N20, |
| | N28, N29, Q60, Q61, Q63, C64, R944, I12, I13, T861, | N21, N22, N23, N25, N26, N27, N28, N29, Q60, Q61, |
| | Z940, O904, O084, T824, Y841, Z490, Z491, Z492, Z992 | Q63, C64, R944, I12, I13, T861, Z940, O904, O084, |
| | UKB.f.20002: | T824, Y841, Z490, Z491, Z492, Z992 |
| | 1192, 1193, 1194, 1519, 1520, 1607, 1608, 1609, 1427, | UKB.f.20002: |
| | 1405 | 1192, 1193, 1194, 1197, 1519, 1520, 1607, 1608, |
| | UKB.f.20004: | 1609, 1427, 1405 |
| | 1195, 1476, 1487, 1580, 1581, 1582, 1618 | UKB.f.20004: |
| | UKB.OPCS4: | 1195, 1197, 1476, 1487, 1580, 1581, 1582, 1618 |
| | M01, M02, M03, M04, M05, M068, M069, M078, M079, | UKB.OPCS4: |
| | M08, M10, M111, M112, M131, M132, M133, M137, | M01, M02, M03, M04, M05, M061, M068, M069, M07, |
| | M164, L746, M172, M174, M178, M 179, X401, X402, | M08, M09, M10, M111, M112, M131, M132, M133, |
| | X403, X404, X405, X406, X408, X409, X411, X412, | M137, M14, M164, L746, M172, M174, M178, M179, |
| | X418, X419, X421, X428, X429, M012, M013, M014, | X401, X402, X403, X404, X405, X406, X408, X409, |
| | M015, M018, M019, M084 | X411, X412, X418, X419, X421, X428, X429, M012, |
| | UKB.f.42027: 0, 1, 2 | M013, M014, M015, M018, M019, M084 |
| | GHS.EHR: kidney transplant or dialysis in billing | UKB.f.42027: 0, 1, 2 |
| | procedures or surgery | GHS.EHR: kidney transplant or dialysis in billing |
| | eGFR < 60 ml/min | procedures or surgery |
| | UKB.UACR > 30 mg/g | eGFR < 90 ml/min |
| | | UKB.UACR > 10 mg/g |
| Chronic kidney | ICD10: | |
| disease, any | N18, Q611, Q612, Q613, Q615, I12, I13, T861, Z940, | |
| | Z492 | |
| | UKB.f.20002: 1193, 1607, 1427 | |
| | UKB.f.20004: 1195, 1476, 1580, 1581, 1582 | |
| | UKB.OPSC4: | |
| | L746, M012, M013, M014, M015, M018, M019, M084, | |
| | M174, M178, M 179, X402, X405, X406, X411, X412 | |
| | UKB.f.42027: 0, 1, 2 | |
| | GHS.EHR: kidney transplant in billing procedures | |
| | or surgery | |
| | eGFR < 60 ml/min | |
| | UKB.UACR >300 mg/g | |
| Chronic kidney | ICD10: | |
| disease, any | N18, Q611, Q612, Q613, Q615, I12, I13, T861, Z940, | |
| including | Z492 | |
| microalbuminuria | UKB.f.20002: 1193, 1607, 1427 | |
| | UKB.f.20004: 1195, 1476, 1580, 1581, 1582 | |
| | UKB.OPSC4: | |
| | L746, M012, M013, M014, M015, M018, M019, M084, | |
| | M174, M178, M179, X402, X405, X406, X411, X412 | |
| | UKB.f.42027: 0, 1, 2 | |
| | GHS.EHR: kidney transplant in billing procedures | |
| | or surgery | |
| | eGFR < 60 ml/min | |
| | UKB.UACR > 30 mg/g | |
| CKD stage 3+ | ICD10: | |
| | N183, N184, N185, N180, N186, T861, Z492, Z940, | |
| | N165 | |
| | UKB.f.20002: 1193 | |
| | UKB.f.20004: 1476, 1195, 1580, 1581, 1582 | |
| | UKB.OPSC4: | |
| | M012, M013, M014, M015, M018, M019, M084, M174, | |
| | M178, M179, X402, X405, X406, X411, X412 | |
| | UKB.f.42027: 0, 1, 2 | |
| | GHS.EHR: kidney transplant in billing procedures | |
| | or surgery | |
| | eGFR < 60 ml/min | |
| CKD stage 5+ | ICD10: N185, N180, N186, T861, Z492, Z940, N165 | |
| | UKB.f.20002: 1193 | |
| | UKB.f.20004: 1476, 1195, 1580, 1581, 1582 | |
| | UKB.OPSC4: | |
| | M012, M013, M014, M015, M018, M019, M084, M174, | |
| | M178, M179, X402, X405, X406, X411, X412 | |
| | UKB.f.42027: 0, 1, 2 | |
| | GHS.EHR: kidney transplant in billing procedures | |
| | or surgery | |
| | eGFR < 15 ml/min | |
| Renal replacement | ICD10: T824, T861, Y841, Z490, Z491, Z492, Z940, | |
| therapy | Z992 | |
| | UKB.f.20002: 1193 | |
| | UKB.f.20004: 1195, 1476, 1580, 1581, 1582 | |
| | UKB.OPSC4: | |
| | L746, M012, M013, M014, M015, M018, M019, M084, | |
| | M174, M178, M179, X401, X402, X403, X404, X405, | |
| | X406, X408, X409, X411, X412, X418, X419, X421, | |
| | X428, X429 | |
| | UKB.f.42027: 0, 1, 2 | |
| | GHS.EHR: kidney transplant or dialysis in billing | |
| | procedures or surgery | |
| End stage | ICD10: N180, N186, T861, Z492, Z940, N165 | |
| renal disease | UKB.f.20002: 1193 | |
| | UKB.f.20004: 1476, 1195, 1580, 1581, 1582 | |
| | UKB.OPSC4: | |
| | M012, M013, M014, M015, M018, M019, M084, M174, | |
| | M178, M179, X402, X405, X406, X411, X412 | |
| | UKB.f.42027: 0, 1, 2 | |
| | GHS.EHR: kidney transplant in billing procedures | |
| | or surgery | |

Individuals were excluded from the control population for all kidney outcomes if they met any of the following criteria: ICD10: N00, N01, N02, N03, N04, N05, N06, N07, N08, N10, N11, N12, N13, N14, N15, N16, N17, N18, N19, N20, N21, N22, N23, N25, N26, N27, N28, N29, Q60, Q61, Q63, C64, R944, 112, 113, T861, Z940, O904, O084, T824, Y841, Z490, Z491, Z492, Z992; UKB.f.20002: 1192, 1193, 1194, 1197, 1519, 1520, 1607, 1608, 1609, 1427, 1405; UKB.f.20004: 1195, 1197, 1476, 1487, 1580, 1581, 1582, 1618; UKB.OPCS4 code: M01, M02, M03, M04, M05, M061, M068, M069, M07, M08, M09, M10, M111, M112, M131, M132, M133, M137, M14, M164, L746, M172, M174, M178, M179, X401, X402, X403, X404, X405, X406, X408, X409, X411, X412, X418, X419, X421, X428, X429, M012, M013, M014, M015, M018, M019, M084; df.42027 in UKB: 0,1,2; GHS EHR: kidney transplant or dialysis in billing procedures or surgery; eGFR<90 ml/min; UKB.UACR>10 mg/g. ICD10 indicates the 10th revision of the International Statistical Classification of Diseases and Related Health Problems; UKB.OPCS4 indicates Office of Population Censuses and Surveys (OPCS) Classification of Interventions and Procedures version 4 as used in the UK Biobank (UKB); UKB.f.20002 indicates self-reported non-cancer illness codes as used in UKB; UKB.f.20004 indicates self-reported medical procedures as used in UKB; UKB.f.42027 indicates end-stage renal disease as defined by central working group for UKB; GHS.EHR indicates billing procedures or surgeries in Geisinger Health System (GHS) relevant to disease definition; UKB.UACR indicates urine albumin:creatinine ratio measured in UKB.

### Genotype Data:

[0421] High coverage whole exome sequencing was performed as previously described (Science, 2016, 354:aaf6814; and Nature, 2020, 586, 749-756) and as summarized below. NimbleGen probes (VCRome; for part of the GHS cohort) or a modified version of the xGen design available from Integrated DNA Technologies (IDT; for the rest of GHS and other cohorts) were used for target sequence capture of the exome. A unique 6 base pair (bp) barcode (VCRome) or 10 bp barcode (IDT) was added to each DNA fragment during library preparation to facilitate multiplexed exome capture and sequencing. Equal amounts of sample were pooled prior to exome capture. Sequencing was performed using 75 bp paired-end reads on Illumina v4 HiSeq 2500 (for part of the GHS cohort) or NovaSeq (for the rest of GHS and other cohorts) instruments. Sequencing had a coverage depth (i.e., number of sequence-reads covering each nucleotide in the target areas of the genome) sufficient to provide greater than 20×coverage over 85% of targeted bases in 96% of VCRome samples and 20×coverage over 90% of targeted bases in 99% of IDT samples. Data processing steps included sample de-multiplexing using Illumina software, alignment to the GRCh38 Human Genome reference sequence including generation of binary alignment and mapping files (BAM), processing of BAM files (e.g., marking of duplicate reads and other read mapping evaluations). Variant calling was performed using the GLNexus system (DOI: 10.1101/343970). Variant mapping and annotation were based on the GRCh38 Human Genome reference sequence and Ensembl v85 gene definitions using the snpEff software. The snpEff predictions that involve protein-coding transcripts with an annotated start and stop were then combined into a single functional impact prediction by selecting the most deleterious functional effect class for each gene. The hierarchy (from most to least deleterious) for these annotations was frameshift, stop-gain, stop-loss, splice acceptor, splice donor, stop-lost, in-frame indel, missense, other annotations. Predicted LOF genetic variants included: a) insertions or deletions resulting in a frameshift, b) insertions, deletions or single nucleotide variants resulting in the introduction of a premature stop codon or in the loss of the transcription start site or stop site, and c) variants in donor or acceptor splice sites. Missense variants were classified for likely functional impact according to the number of in silico prediction algorithms that predicted deleteriousness using SIFT (Adzhubei et al., Nat. Methods, 2010, 7, 248-9) and Polyphen2_HVAR (Adzhubei et al., Nat. Methods, 2010, 7, 248-9), LRT (Chun et al., Genome Res., 2009, 19, 1553-61) and MutationTaster (Schwarz et al., Nat. Methods, 2010, 7, 575-6). For each gene, the alternative allele frequency (AAF) and functional annotation of each variant determined inclusion into these 7 gene burden exposures: 1) pLOF variants with AAF<1%; 2) pLOF or missense variants predicted deleterious by 5/5 algorithms with AAF<1%; 3) pLOF or missense variants predicted deleterious by 5/5 algorithms with AAF<0.1%; 4) pLOF or missense variants predicted deleterious by at least 1/5 algorithms with AAF<1%; 5) pLOF or missense variants predicted deleterious by at least 1/5 algorithms with AAF<0.1%; 6) pLOF or any missense with AAF<1%; 7) pLOF or any missense variants with AAF<0.1%.

Association Analysis of Gene Burden of Rare pLOF and Missense Variations:

[0422] Association between the burden of rare predicted loss-of-function or missense variants in a given gene and phenotype was examined by fitting a linear (for quantitative traits) or firth bias-corrected logistic (for binary traits) regression model adjusted for a polygenic score that approximates a genomic kinship matrix using REGENIE (Mbatchou et al., Nat. Genetics, 2020, 53, 1097-1103). Analyses were stratified by ancestry and adjusted for age, age², sex, age-by-sex and age²-by-sex interaction terms, experimental batch-related covariates, 10 common variant-derived principal components, and 20 rare variant-derived principal components. Results across cohorts for each variant-phenotype association were combined using fixed effects inverse variance weighted meta-analysis. In gene burden tests, all individuals are labeled as heterozygotes if they carry one or more qualifying rare variant (as described above based on frequency and functional annotation) and as homozygotes if they carry any qualifying variant in the homozygous state. This “composite genotype” is then used to test for association.

[0423] Various modifications of the described subject matter, in addition to those described herein, will be apparent to those skilled in the art from the foregoing description. Such modifications are also intended to fall within the scope of the appended claims. Each reference (including, but not limited to, journal articles, U.S. and non-U.S. patents, patent application publications, international patent application publications, gene bank accession numbers, and the like) cited in the present application is incorporated herein by reference in its entirety and for all purposes.

1. A method of treating a subject having a kidney disease, chronic kidney disease, a kidney stone, chronic glomerulonephritis, nephrosis, nephronophthisis, chronic interstitial nephritis, or nephrosclerosis, or preventing a subject from developing a kidney disease, chronic kidney disease, a kidney stone, chronic glomerulonephritis, nephrosis, nephronophthisis, chronic interstitial nephritis, or nephrosclerosis, the method comprising administering one or more Aldehyde Dehydrogenase 1 Family Member L1 (ALDH1L1) inhibitors, Fructose-Bisphosphate Aldolase B (ALDOB) inhibitors, Glucose-6-Phosphatase Catalytic Subunit 1 (G6PC) inhibitors, LDL Receptor Related Protein 2 (LRP2) inhibitors, Ribosomal Protein L3 Like (RPL3L) inhibitors, Solute Carrier Family 25, Member 4 (SLC25A45) inhibitors, or Solute Carrier Family 7 Member 9 (SLC7A9) inhibitors, or any combination thereof, to the subject.

2-8. (canceled)

9. The method according to claim 1, wherein i) the ALDH1L1 inhibitor comprises an inhibitory nucleic acid molecule that hybridizes to an ALDH1L1 nucleic acid molecule: ii) the ALDOB inhibitor comprises an inhibitory nucleic acid molecule that hybridizes to an ALDOB nucleic acid molecule: iii) the G6PC inhibitor comprises an inhibitory nucleic acid molecule that hybridizes to a G6PC nucleic acid molecule: iv) the LRP2 inhibitor comprises an inhibitory nucleic acid molecule that hybridizes to an LRP2 nucleic acid molecule: v) the RPL3L inhibitor comprises an inhibitory nucleic acid molecule that hybridizes to an RPL3L nucleic acid molecule: vi) the SLC25A45 inhibitor comprises an inhibitory nucleic acid molecule that hybridizes to an SLC25A45 nucleic acid molecule; and/or vii) the SLC7A9 inhibitor comprises an inhibitory nucleic acid molecule that hybridizes to an SLC7A9 nucleic acid molecule.

10-15. (canceled)

16. The method according to claim 9, wherein the inhibitory nucleic acid molecule comprises an antisense nucleic acid molecule, a small interfering RNA (siRNA), or a short hairpin RNA (shRNA) that hybridizes to an ALDH1L1 mRNA, an ALDOB mRNA, a G6PC mRNA, an LRP2 mRNA, an RPL3L mRNA, an SLC25A45 mRNA, or an SLC7A9 mRNA.

17-55. (canceled)

56. The method according to claim 1, further comprising administering a therapeutic agent that treats, prevents, or inhibits a kidney disease, chronic kidney disease, a kidney stone, chronic glomerulonephritis, nephrosis, nephronophthisis, chronic interstitial nephritis, and/or nephrosclerosis in an amount that is the same as or less than a standard dosage amount to a subject who does not have one or more of the ALDH1L1, ALDOB, G6PC, LRP2, RPL3L, SLC25A45, or SLC7A9 variant nucleic acid molecules.

57. The method according to claim 1, further comprising administering a therapeutic agent that treats, prevents, or inhibits a kidney disease, chronic kidney disease, a kidney stone, chronic glomerulonephritis, nephrosis, nephronophthisis, chronic interstitial nephritis, and/or nephrosclerosis in a dosage amount that is the same as or less than a standard dosage amount to a subject that is heterozygous for one or more of the ALDH1L1, ALDOB, G6PC, LRP2, RPL3L, SLC25A45, or SLC7A9 variant nucleic acid molecules.

58. The method according to claim 1, wherein any one or more of the ALDH1L1, ALDOB, G6PC, LRP2, RPL3L, SLC25A45, or SLC7A9 variant nucleic acid molecules is a missense variant, a splice-site variant, a stop-gain variant, a start-loss variant, a stop-loss variant, a frameshift variant, or an in-frame indel variant, or a variant that encodes a truncated predicted loss-of-function polypeptide.

59. The method according to claim 58, wherein any one or more of the ALDH1L1, ALDOB, G6PC, LRP2, RPL3L, SLC25A45, or SLC7A9 variant nucleic acid molecules encodes a truncated predicted loss-of-function polypeptide.

60. A method of treating a subject with a therapeutic agent that treats or inhibits a kidney disease wherein the subject has a kidney disease, or preventing a subject from developing a kidney disease by administering a therapeutic agent that prevents a kidney disease, the method comprising the steps of:
determining whether the subject has any one or more variant nucleic acid molecules encoding an Aldehyde Dehydrogenase 1 Family Member L1 (ALDH1L1), a Fructose-Bisphosphate Aldolase B (ALDOB), a Glucose-6-Phosphatase Catalytic Subunit 1 (G6PC), an LDL Receptor Related Protein 2 (LRP2), a Ribosomal Protein L3 Like (RPL3L), a Solute Carrier Family 25, Member 4 (SLC25A45), or a Solute Carrier Family 7 Member 9 (SLC7A9) predicted loss-of-function polypeptide by:
obtaining or having obtained a biological sample from the subject; and
performing or having performed a sequence analysis on the biological sample to determine if the subject has a genotype comprising any one or more of ALDH1L1, ALDOB, G6PC, LRP2, RPL3L, SLC25A45, or SLC7A9 variant nucleic acid molecules encoding a predicted loss-of-function polypeptide; and
administering or continuing to administer the therapeutic agent that treats, prevents, or inhibits the kidney disease in an amount that is the same as or less than a standard dosage amount to a subject that is ALDH1L1, ALDOB, G6PC, LRP2, RPL3L, SLC25A45, and SLC7A9 reference, and/or administering one or more ALDH1L1 inhibitors, ALDOB inhibitors, G6PC inhibitors, LRP2 inhibitors, RPL3L inhibitors, SLC25A45 inhibitors, or SLC7A9 inhibitors, or any combination thereof, to the subject;
administering or continuing to administer the therapeutic agent that treats, prevents, or inhibits the kidney disease in an amount that is the same as or less than a standard dosage amount to a subject that is heterozygous for any one or more of ALDH1L1, ALDOB, G6PC, LRP2, RPL3L, SLC25A45, or SLC7A9 variant nucleic acid molecules, and/or administering one or more ALDH1L1 inhibitors, ALDOB inhibitors, G6PC inhibitors, LRP2 inhibitors, RPL3L inhibitors, SLC25A45 inhibitors, or SLC7A9 inhibitors, or any combination thereof, to the subject; or
administering or continuing to administer the therapeutic agent that treats, prevents, or inhibits the kidney disease in a standard dosage amount to a subject that is homozygous for any one or more of ALDH1L1, ALDOB, G6PC, LRP2, RPL3L, SLC25A45, or SLC7A9 variant nucleic acid molecules;
wherein the presence of a genotype having one or more of ALDH1L1, ALDOB, G6PC, LRP2, RPL3L, SLC25A45, or SLC7A9 variant nucleic acid molecules indicates the subject has a decreased risk of developing the kidney disease.

61. The method according to claim 60, wherein the subject is: i) ALDH1L1 reference, and the subject is administered or continued to be administered the therapeutic agent that treats, prevents, or inhibits the kidney disease in an amount that is the same as or less than a standard dosage amount, and is administered an ALDH1L1 inhibitor; ii) ALDOB reference, and the subject is administered or continued to be administered the therapeutic agent that treats, prevents, or inhibits the kidney disease in an amount that is the same as or less than a standard dosage amount, and is administered an ALDOB inhibitor; iii) G6PC reference, and the subject is administered or continued to be administered the therapeutic agent that treats, prevents, or inhibits the kidney disease in an amount that is the same as or less than a standard dosage amount, and is administered a G6PC inhibitor; iv) LRP2 reference, and the subject is administered or continued to be administered the therapeutic agent that treats, prevents, or inhibits the kidney disease in an amount that is the same as or less than a standard dosage amount, and is administered an LRP2 inhibitor; v) RPL3L reference, and the subject is administered or continued to be administered the therapeutic agent that treats, prevents, or inhibits the kidney disease in an amount that is the same as or less than a standard dosage amount, and is administered an RPL3L inhibitor; vi) SLC25A45 reference, and the subject is administered or continued to be administered the therapeutic agent that treats, prevents, or inhibits the kidney disease in an amount that is the same as or less than a standard dosage amount, and is administered an SLC25A45 inhibitor; and/or vii) SLC7A9 reference, and the subject is administered or continued to be administered the therapeutic agent that treats, prevents, or inhibits the kidney disease in an amount that is the same as or less than a standard dosage amount, and is administered an SLC7A9 inhibitor.

62. The method according to claim 60, wherein the subject is heterozygous for: i) an ALDH1L1 variant nucleic acid molecule, and the subject is administered or continued to be administered the therapeutic agent that treats, prevents, or inhibits the kidney disease in an amount that is the same as or less than a standard dosage amount, and is administered an ALDH1L1 inhibitor; ii) an ALDOB variant nucleic acid molecule, and the subject is administered or continued to be administered the therapeutic agent that treats, prevents, or inhibits the kidney disease in an amount that is the same as or less than a standard dosage amount, and is administered an ALDOB inhibitor; iii) a G6PC variant nucleic acid molecule, and the subject is administered or continued to be administered the therapeutic agent that treats, prevents, or inhibits the kidney disease in an amount that is the same as or less than a standard dosage amount, and is administered a G6PC inhibitor; iv) an LRP2 variant nucleic acid molecule, and the subject is administered or continued to be administered the therapeutic agent that treats, prevents, or inhibits the kidney disease in an amount that is the same as or less than a standard dosage amount, and is administered an LRP2 inhibitor; v) an RPL3L variant nucleic acid molecule, and the subject is administered or continued to be administered the therapeutic agent that treats, prevents, or inhibits the kidney disease in an amount that is the same as or less than a standard dosage amount, and is administered an RPL3L inhibitor; vi) an SLC25A45 variant nucleic acid molecule, and the subject is administered or continued to be administered the therapeutic agent that treats, prevents, or inhibits the kidney disease in an amount that is the same as or less than a standard dosage amount, and is administered an SLC25A45 inhibitor; and/or vii) an SLC7A9 variant nucleic acid molecule, and the subject is administered or continued to be administered the therapeutic agent that treats, prevents, or inhibits the kidney disease in an amount that is the same as or less than a standard dosage amount, and is administered an SLC7A9 inhibitor.

63. The method according to claim 60, wherein any one or more of the ALDH1L1, ALDOB, G6PC, LRP2, RPL3L, SLC25A45, or SLC7A9 variant nucleic acid molecules is a missense variant, a splice-site variant, a stop-gain variant, a start-loss variant, a stop-loss variant, a frameshift variant, or an in-frame indel variant, or a variant that encodes a truncated predicted loss-of-function polypeptide.

64. The method according to claim 60, wherein any one or more of the ALDH1L1, ALDOB, G6PC, LRP2, RPL3L, SLC25A45, or SLC7A9 variant nucleic acid molecules encodes a truncated predicted loss-of-function polypeptide.

65. The method according to claim 60, wherein: i) the ALDH1L1 inhibitor comprises an inhibitory nucleic acid molecule that hybridizes to an ALDH1L1 nucleic acid molecule; ii) the ALDOB inhibitor comprises an inhibitory nucleic acid molecule that hybridizes to an ALDOB nucleic acid molecule; iii) the G6PC inhibitor comprises an inhibitory nucleic acid molecule that hybridizes to a G6PC nucleic acid molecule; iv) the LRP2 inhibitor comprises an inhibitory nucleic acid molecule that hybridizes to an LRP2 nucleic acid molecule; v) the RPL3L inhibitor comprises an inhibitory nucleic acid molecule that hybridizes to an RPL3L nucleic acid molecule; vi) the SLC25A45 inhibitor comprises an inhibitory nucleic acid molecule that hybridizes to an SLC25A45 nucleic acid molecule; and vii) the SLC7A9 inhibitor comprises an inhibitory nucleic acid molecule that hybridizes to an SLC7A9 nucleic acid molecule.

66. The method according to claim 65, wherein the inhibitory nucleic acid molecule comprises an antisense nucleic acid molecule, a small interfering RNA (siRNA), or a short hairpin RNA (shRNA).

67-72. (canceled)

73. The method according to claim 60, wherein the kidney disease is chronic kidney disease, a kidney stone, chronic glomerulonephritis, nephrosis, nephronophthisis, chronic interstitial nephritis, or nephrosclerosis.

74-79. (canceled)

80. The method according to claim 60, wherein:
when the kidney disease is chronic kidney disease, the therapeutic agent is chosen from furosemide, bumetanide, ethacrynic acid, metolazone, hydrochlorothiazide, a blood pressure medication, a phosphate binder, sodium bicarbonate, and a cholesterol medication, or any combination thereof;
when the kidney disease is a kidney stone, the therapeutic agent is chosen from potassium citrate, furosemide, bumetanide, ethacrynic acid, metolazone, hydrochlorothiazide, allopurinol, acetohydroxamic acid, and mercaptopropionyl glycine, or any combination thereof;
when the kidney disease is chronic glomerulonephritis, the therapeutic agent is chosen from lisinopril, enalapril, captopril, benazepril, fosinopril, quinapril, furosemide, bumetanide, ethacrynic acid, metolazone, hydrochlorothiazide, amlodipine, nifedipine, felodipine, isradipine, verapamil, diltiazem, metoprolol, bisoprolol, esmolol, atenolol, propranolol, sotalol, labetalol, pindolol, penbutolol, clonidine, tizanidine, and dexmedetomidine, or any combination thereof;
when the kidney disease is nephrosis, the therapeutic agent is chosen from lisinopril, enalapril, captopril, benazepril, fosinopril, quinapril, furosemide, bumetanide, ethacrynic acid, metolazone, hydrochlorothiazide, atorvastatin, fluvastatin, lovastatin, pravastatin, rosuvastatin, simvastatin, losartan valsartan heparin, warfarin, dabigatran, apixaban, rivaroxaban, rituximab, cyclosporine, and cyclophosphamide, or any combination thereof;
when the kidney disease is nephronophthisis, the therapeutic agent is erythropoietin; and;
when the kidney disease is chronic interstitial nephritis, the therapeutic agent is succimer or edetate.

81-157. (canceled)

The application's sequence listing, which the Patent Office published only in electronic form, follows.

SEQUENCE LISTING (368 sequences)

SEQ ID NO: 1 - DNA, 77241 bp, Homo sapiens
  source 1..77241: mol_type = genomic DNA
acagtaagtcttcttgacctaagcgggaaagagcgcaggcccctgcggggttggcttttacatggcatttatagacccgcccggagagggtgcgctgcgctcccgccatagtcccaccaccggtgagcgccgcccccactcggctgactctccgcccgccccgcgcccctcccctcacgggctctggccttaaccagagctcgcggactggcggggacaggtcccacctcctggctcccaggacgggtctgcaccaacctcagtttcggggctgcggctcacagaagtctaacctgcccgggacgcccgcaccaactcctgcgcgcggtgagtttctgggctctcgagagcgctggactcccggcggaaaggaggctgccccggctgcagctccgggggctccgggggctccaggggctccaggactcggttctcaccgcaagggctcctgcggggcccatcaacttcgccgctgggacgccgggctcggggtacgggtccggagttctttggagcaattgaggctgaacctggccaggggtcatcaggctaaatgaccgcagcgccaggactggcccgccgaggatctggccggccgcggtggtagggcccttacggagctggcgccaacctgtggggtgggcactgctggcccggcttatggaagagaaaactgaggctcgataagagaaagggaccagcgaaggcgacgcgatgatttgtgactggggactacctgtttcctgggcccctcgaccccattctgtgacagggaaaggtcttccctgattggccaaatctgggggcctggcacgagggcctcttgtgattggaggggtcgacgtgagcgctcaggggctgcgctggagtcccagctccagccactgcgctcaagtggacggtcgcgcgtgcagagggaggccggatagcagaccccacaacgtggctcctggggccccgctatcgagagctcaggccccgcgggcacttgcctaggagaggaaagaatcttcccaaagtgcagacagagacggaatttaatcaggagtcccagacttggagtttggaggcatgggctctggtgtcaggtgactttgtttcctccccacgcctccacttctccttgaccttgggcaagtttcttgtgttctgaatcttagtttcttgtctctaaaatcgggaggggcaatgaacagtagtgcctgcctcccaagattgcttgagaattacatgagactgccccgcgcctggccctaggaaaccctcggagaatgttggctgctgtttgtttgtttgtttgtttgagacagagtctcgctctgtcgcccaggctggagtgcagtggcacgatctcggctcactgcaacctccgcctcccgggttcaagtgattctcccgcctcagcctcccgagtgctagaactgcattcatgggccccagggccctagcaccagaacagagggcccagagctgcagtcctgcagggtggcccagcctcacagggactagaagctgggtcctggagagccaagcctgggctgggaattgggtaggagggttgggaggcccaggaagcctcccagtgtccccacaccaccaagtgaaaggacactgagcggccatgactgggggaggaggtggaggcctggaggcggcccatacggcccacaaggggctctatgggcttcactgcaggcccctgctctttctggggccaaagggcaagcctgattgaggcccctcccaaggctcccgtgcctgccattctggctttccctggactgtgacaacagccccttggtggccacctggactctgcctccctgcagggggggaacgacatactcttttatttttttttttcagaagtaatcatgtacaatataaaaaaagaacattcagttaagaaaacaaaataattacagtcgtcaaaaacctctgaaacccaaaaccctttacccagtaactttcaacatttcagtgtaaattcttctaggcttttaccctgcagataaacacacgcatgcacacacagacacacacacacacacacacaaacttaagccttacacaattatcgtggtttgttacttgttgggtgttttgacagtgtcaggtttgtataactcaatatttaccaatattttctaataatttaatgttttcttcttatatttgattttcaagtatttatttttaacccaattggactgtattttagagtaagatgtgaactatagagctagattcatttatttatttcaattagtagacatttttagagcagttttaggtttacagaagaattgaggacggagtgcagagttcccatattctcagtctgtcccttcctgcgcgctttctcctatttttctttctattcttttcctttctttttttttttttctttttttttttttttgagacagggtctcactttgttgcccaggctggagtgcagtggcacaaacacagcttactgcagctttgaactcctgggctcaagtgattctcatgcctcagcctcccaagtagctgggactacaggcatgcacaaccacgcctggctaatttaaaaatttttttgtagagatgggtctcactttgttgcccaagctggccttgaactcaagggctcaagtgatcctctgccttggcctcccaaagtgctgggattacaggcatgaaccactaggcctggcctcccctatttttaacatcatgcattgataggatatttttgttacagcttttttctttttgaaacagtcttgctctgttgcctaggctggagtgcagtggcacaatctcagctcactacagtttctgcctcccaggttcaagcaattcttgggcctcagcctctcgagtagctgggattacaggtgcaccaccatgcccagctaattattgtatttttataatagtagagacagggttttaccatgttagccaggctgcttttgaactcctggcctcaagtgatcagcccgccttggcctcccaaagtgctgggattacaggtgtgagccaccaggcctggccaattttgttatacttggtgagccaatatcgatgcaatgttattaatgaaagtccataatttacattagaattccctcttggtgttgtaccttctatggttttggacaaacatataatgatgagtatccagtgttacagtatcatagagaatagtttcactgccctaaaactctcctgtgctctacccatccaccccccaacccccctacctatccctggcaaccactggttactgcctttgtagttttgccttttccagaatgtcatatagtatgtatgaatcatatggtatatagcctttccagactggcttctttcgcttagcaaaatgcatttaagcatcctccatgtctttctgtgacttggtaacccatttctttttatcattgactaatattctgttgtatggatgtggaggtaccacagtttatttctccattcacatactacaggatatcttggttgcttccaagttttagcagtgaataaagctgctatcaacatttgtgtgcaggtttttgtgtggacattagttttcttctcctttgagtaaatatcaagagcgattgatggatcacatggtaaaagtatgtttcgtgttataaaaaactaccaaacctttttccatagtggtggcataatttttcatttctaccagtaataaataagagttcctgttgctccacagcctcatcagcatttgttgtcagtgctcttaatttaactcttctaatacgcatatagtagtatctcattgttatattttaatttgcaatctgtaatgacttacagtgttgagcatctttttaaatgcttctctgccatctgtatatcttcttttgtgaatgtcggttaatttacttggcccattttaaaattgggttgtttgttttactgttgagttttaatagttctttgtatattttggataacagtgctttaccagatatgtcttctctccccaaccatggcttgtcttttcattctcttaacagtgtcttttgcagagcagaagttttaaattttaataaggtctaatgtaccattttttttcctccatgaattgtgctgttgttgttgtatctaaaaagtcaaatccaagttttggcagttacaaataaagatgctgtaaacatcagtgtacagatatttgtgtgatttttgtgcaatgcagattttctccattgtcttgcctttgtctctttgtcaaagttcagttgactgtattgatgtgagtttacttctgggctctctattctgttcaattgatctatctgactattcttttgccaataccgtactgtcttgattactgtagctttatagtaaagtcttggggacaggcagtatcggtcctctaacttcgttctccttcaatattgtgttgactatcccaggtcttttgtctctccaaataaacttgagaatcagtttgttgatatccacaaataactgctggggttttgattgggattgcattgaatctatagataaagtcggaaagaactgacatctggacagtatagagtttccctacccatgaacatgtactatctcttcatttatttatacatatttttatgttttcatcagttatggttattctcacatagattttgacctattttaggtttatgtataaataattcactttttggtgctaatgtaaatggttttgtgtttttaatctcaaatttcaattgtttattgctagtatataagaaagtaatcaatttttgtatattaaccatgactttacatccagcaactttggcagaataacttattatttccagttttctgttgctttgttggcattttccacatagccaattatgttttttgagaacaagaacagtttatttcttccttcccaatctgtagacttttcattttcttttcttttctaattacattagccagcacttccagtataatgttgactaggaagggtgaaagggaacatccttgccttatttctgatcttaggggaaaagcttctagtttctctccattaagtatgatgttagctgtaggtttttcatagatcttctttatcaagttaagttcccatttattactagcttgctgaaagctcttatcataaatgaatgttagattcttgtcaaatgcattttctggatctattgatgtgatcatataattcttccttagcctattcatgcgatggattacattaattgattttcaaatgtttaacctagaataaatcccatgtggtggttatgtataattctttttaaacattgttggattcaattgctgatttttttgaggattttaacatctatgtttatgagaaatattgatctgttagtttcctttcttgtaatgtttctggttttggtaccagggtaattctgacccaagaaaattagagaatttcctctacttctattttttgaaagagatcatagagaattggcataatttctttcttaaatgtttagtcatattcattaaccctagtgctttctattttggaaggctactggctccagttctttaatcagtataggcctattcagattatctatttctctttgtgtgagttttggaacgttgtactttcaagggattgtttcatttcatttaacttaccaaatttgttgatatagagttgttcatactagtattttattatccttttaatgaccgtaggatcagtattgatggcccttctttcatttttgatattagtaatttgagtcttctctctttttcttcttagttaacctggctagaggtgtctcagttttattcatcttttcaaggaaccagctttaggttttgttgattttctctattgacagcatgttttcaatttcacaagttctgctgtaatttttattatttcctttcttctgtttattttggatttaatttgctcttctttttctagtttcctaatttggaaacttgcttttagctctttcttctttaataatatatgcattcagtgctctaaatttccctctaaacactactttagcagcatcccataaattttgatgttatattttcattttaatttagtttgaaatattttaaattttttcttgagagttattctttgatttgtttacatgttgtttagaagtgtgtcatttagtttccatttttttaatgtttttcagatatctttctgttattgatttctagtgattctgttgtgatctcagtaatctccatcatagaagtcattgatatttgttgttgtatgttttatggcacagaatgtggtctgtcttgatgaatattccatgtgaacttgagaagaatgtgtattctgttgttgttgggtgaagtattctctaaatgccaattagatacacttaattgatggtgctgttcaactatgtccttactgatttccagcctgctggatctatcagttagtgggtactggccaggcacggtggcttacgcctgtaataccagcactttgggaggccgaggtgggcagatcacctgaggtcaggagtgcgagaccagcctgaccaacatggaggctctactaaaaatacaaaattagccggacgtggtggtgcatgcctgtaatcctagctactcgggcggctgaggcaggggaattgcttgaacccgggaggcggaggttgcagtgagccgagatcgtgccactgcactccagcctgggcaacaagagtgaaactccgcccccccaaaaaaaacgttagtggggactgacagagaggtgttgatgtctccaactgtaataatagtggattcatctatttctccttaaaattctgtcagtttttgctttacacattttagcactgttgttaggcacatacatattaaggagtattatgtctgctgggataattgactcctttaccattatgtagtgcttctctttattcctaataattttcctttctctgaagtctgctttatctgaagttaatagaactactccatatttcttttgattagtggtagcacggtatatctttctccatccctttatttgtaacctatctggtttttatgttgaaatgggtttgttgtagacaacatatagttaggtcacgattctttattcactctagatagtcacatgttttaattggtatatttacaccattgatatttgaagtgattttttgatatagttggattaatatttaccatatttattactgttttctatttgccctttgtttcttttttcttccacacttttttctgccttttctgatcttaactgagcattttatatgattccattttcttttctctcttagcatatcagttttacttttttgttgttgcttttttagtggttgacctacagtttgcaatatacacttaaatctaatttaagtctgcttttgaataacactatacaactttatgggtagtgtaagggccttattgcagagtattcttgattcctccctcccatgccttattattactgctatcattcatttcacttatccataagctacaatcactgaatacattgttgcaattattattttgaacaaattgttatctctcagattaagaataagaaaaaaaattatttcacatttatttctaatactcttttgtatgttgagtttctgacttgtttaattttcctttttttctgaattacttcttttaacatatcttgtaaggcagtttactggtgacaaattccttcaatttttgtttgagaagtctttctcctccacttttgaaggacaattttactgcatacagatggaatctagttagttctaagttgatggaatgttttcagttctttaaataattctttctattctattcctgattgcatggtttatgaagagacgtttgatgtaatcctcatctctctccctctataggtaaggtgtcctgccctgcctctccctggcttcactgaagattatctctgtgtcttttattttttgcagtttgaatatgatatgcctaagtatagattttttggggggtggggggtgatctttatcctatttggtttcctctgagctgcttggatcttggtttggtatctgtctttaattttggaaaattatcagtcattatcacttcaaacatttttactattcctttctttctttttattccatctgatatccctattacaaggatttacacctatggcaattgtcccaccattcttggatattctgttttgtcttttttattctatatttccctttgcatttcagtttgggaagtgtttgttgatatttcatccatctcattgattatttcctcaactgtatccagtctattgataaacctattaaagacattctttgcatttatcacagggtttttatttctagactttttttgatttttttcttaatttccatctctctgcttacatgaccaatttgttcttatatgttctccacatttttccattagagctcttagcattttaattatcattgttttaaattttccatctgaaaattccaacattgcttccatatctgattgtggtttaggtgcttgtttcatctttgcaaactgtgtttttgtcttttatatatcttgtaattgttttgcagaaaatcagatataatgtattgggtaaaaggtactgaggtagataggcttttagtgtgaggtttgatatttacctgtctaggagttagaatgtgtttactatttgctatagctgtgggtatcagaggatataattttctctcttcatcttcttgtttttgtctaccctgttgtctttgggtttttgtagaaactccttaaataggctctggcttgcagttctcttatccgtaatccccttgttactatactggagccctgtggatgtagtagcaaggtgttttggtggggggaagtgttttacagtcctacaattaggtcttagtgtttcagtgagcctgcacccctgggctgtgaccttcacaagtgtttctcagtcctaccccttttaggtgatgagaaaggctagaggggctggatttgggtttttcctcatcacttaggttagttaggccctgggtgtccattcacttaggctctggtataatagtttctatgagggtagatatgttgagaaaaaaatgactgctttccttgcctcctgccaaaaccagaaggggatttttctccaatccttactgtgagaactgtaagaattaaagaaagaggaaagaaatacaaaagctggcttgccagttaagacatttattttagagaaaatcaacctgaaaggagccttctggccaagttaggtcagaggcacactctcttacagactgagtttttaaggattcaggatgggagagtttatcagaggcttggactgcttctgtgtctctttgttgtgcttatctgggagggagagttgtgtgcctgttttcatacatttttcctgcagctgcaggtatagtccctgagtctgtttttacttatttattgagacagagtctcgctctgtcgctaggccggagtgcagtggcgccatctcggctcactgcaacctctgcttcccaggttcaagcgattttcctgcctcagcctcctgagtagatgggactacaggcatgcgccaccacgcctggctaattttttgtagttttagtagagacggggtttcaccgtgttagccaggatggtcttgatctccttacctcgtgatccgcccgcctcggcctcccaaagtgctgggattacaggcatgagccaccgcgcccagccaagagtctgcttttagctttcctgtcttagtgcccctgaaggaaagggaatgtgcttgttccttattattaaggcccactgttttactggggcccatcgtatgagggtgaagtttggcagttacccaagatactttccccccacctccctttgtgtcccagctgtcttatccgtgttttactgtctgctctttctggctgcttgtagttagaagagaagtgatttccttgaaatgcatgaggctagaaagggagctggaatttaaagtggcggtgtttgtctgagatgacagtactcctgctctatcattccagaccctatggttataaaaggacaagaggggacatgttctttctagctacttcctgctgatgcgggggtggagagttttttggtcttagattgactgtaggatcaacaccatttgtagatgtttttgggtagttgcgaaatggccatgattctgtcggttaaaaatttttgataaaggttaattaggcagagtaaaaacattagtcctaggcttttcagcagcattttttattaggcccgactggttgagacagaagtaactttttttttttttttttttaatgacaggcagaggtgcatgtttggaaagacccatgtgttattttttgttagtaactgttattcctgctatgaggataataattaagcaaaatgctacagtaattgagattctctgtcagatattccactctgagggttcacagtcctactgcaaatagtagagtgagtacagcagttcccgcgagggtgtcatagtaaataattttcattaaaaaaggttttaatagttggcttaaaaggagaagtagaaacgacaaaaagtatttggtgaggtggggttgagactgagtaagatgagcaatttttacttagttacttaacttttatgatttttagcttaagatttcttatttatttttttacatgaataggactttttttggactgttaggggttgctttctcagctctttaggctttgacttgaatatgatgtatccaggagttgatttctgtaacggatataatttaaactgtaaaagataataaaaattgaaaaatgttaggcaagactagaatttaacaacaggtgtgctatagtttttgaaacataatttttacttttcagtttcctatttttattaaaagaatttatgataggactgatttgctttattatacttggcttaattatttgtatacagtgcagcaataataattatttgctacataggccttttaaatcagctttgatggaactttgttacatagaaggaatttgagataagagttgttaaagccaagcccagccatggatttgtaccattaaatacttatgagttgggtgaattccttttcttttgaggttttaagataacttggggttcctggcctgtcagaaagtgacattctttacttaccacacatcagaaaccctgtacagggactgtgcacacaaaatatgaggccagttttccaagggtttcattggcttcttaagtttgattccttagaggagagcacaccattccagtcaaagccttgggaaaataaccagtttttccaattgtattctgttacaaaagaaaatagattcttattgcactgatgcaaacaactgtagtgttgtcctttaagaatgcttataactagtttttaaattctagaggaactaggcaaagagaaaaaaacacgctttaaattctatttacaggagtatactttacttagttgttagaagctgtagctagcttaagacaagttttcttgactctgaaaaataagataaagattagcagcattctaaggaaaaggtaaaaacttgtttttgttttttattagtttagtgcattttattaatttttgttttgcttgatatttataaacattttagctttttgtgagttctgcatgttttgttgttgttgttgctgttgtgagaaacctgcctttgagagcgcttgttaaagtttcacagcttgaatataaaccacgttttgaagataattcaaacaaaataaaaattgtctgtaaataacaaaatgtctagtttggatactgttagaaacacaattgacaaagaaatgtggttgtttttgtggtttacaataacccaacataacaactttaagtgtgattaatagcacatatttagacataagaaccttagacatcccatacagttttggaacatatgttagtattattccttagaatataacctattagacagtcttttggaaattttatgttgctaaataattctgtttacctctttttggatggtttaggggttttgtgcagcaccgaaaagccaggggttaggaaagacaacctcgagactaaagtttgatttggggaagactgttaaatatgtttaaaatttaaaaccctcgatattatgaaatagaattttagattaccgttaagtttttttctgtttgttttgttttgctaaaatgatgagataacaatctggaaaagcaaaaaccatttattagccttttgtattacaggaaaattttgtttaagagagaaagttaaattttaccctttcattagtttgctattaatgttaactttaattttaatgaaaccttatagataattttatttaattttaatgagtttgactatgaagtgagatttttatatgcccattataacccttgacaagttttgctaaagagtagattagcattttaagaaaatcttgtggtgcttttattttagtgtttaatttacagaaaaaaagcatataatactcttttgagtttagttaatgtgttaacacacaagagttttatttgcagaattaatttttatgatgtttttacaatttgcctaaacctttcactttattttatttaattttaagacaatttattattcttcagcaaaatgtacatttttatgcctttttataatttttaactaaaaacactttttactgtttttatacaccttgcatgcaaatccatgtttagcagttttaattacatgttataatgataacttttagcaatttttaactttaaggtaaaatgtgttaagtttttttgtgtgtgacttgaaactaaaaacactgactcattttgtaatttgggcgaagtagctctgaaatataatgctgttttttcaattttaaacacttgggtaaaatcgcaaggtgagtgcttaggtagaaataagtaactactgaacaggtgggagcaaagtttagttgggcaatactctttatgataccgacatgtgaatgcttactagttttaaaagtgctggctttattgttgtagtcacagaggagtctaaaggcaaggctgggtagcttctggctcccacgttaacattatttatttagtatgccagatttttcttaaggtgcactagccactgaggatatttttgctggtgggaactgagattttctagacaggtaaattagctgccaattatggtttatcttagggacatgtttatagagatagtattcttacttagcttgcattctaaattttgttcccttattatcttgttaaagcgatgaatatgtttgtacaatgaagacaactttttttgcctttttaggttagagcttcagcatgagaattatacttcaacacagaaagttaggtctataagtgaaatataataaagtgttctgaaaagaaggagactaccttacaaccccaagagaaaaatatgcggcactaagccctggttccttttttccttattgttttgtcatttttttagaactttgggaactaaaatctttttgcttaaatgctgaatttataaattgaaacagactcttgggttttgttataaaggcaacgtaataatacttctatgtattttataggcttatatagtataataacttgaatttatggttggatttgactgaacctacgtagatactaatctgaatgactcatatacagaaaatgtgcagtattttaagtataaaaaattaaactggactagtttgcttttgttttatagtataaatgaaaatgacccaaactatttaattgtatgagcagaaattatgaatgaaagatgtattttagagctatatgacagaggggcattttaacttgaattccccagtggcaaaagtagtgtataaactaatgctagtgtatacactactgaagtgccaacttatgtaacatttttaaatttaatttttaaaatgaaagatttttttttcactgtgaagggcagtaacattaaattttcccagtgggtatgagtgaatgatttacttagtacattgatatacttaactattagcatttttgggaagctggatttgatacaaatttattttgaaaaacatggtttatgaaattttataataaaattattaataaagacattgttaagtttctataaacatgcactaaaagtggcaagacagagtggagaaatgtaattttggctgagaaaaaaacttttttcaggaaaacaagatttatgaagagaaaaacataaaggacttttgaatatactttcttggatatccattttaattaagctgagcactcttttttattaaaggtaagggtggattttggaattatataaatgttatgccaagttaaatgaaaggattgagttatatgcaggaattccctgtgataatgagagggatttttagagaaagatcccagaagctgttctatctgccacaaatcagacatggagaaggggacatgaacgtgagcaatgcctttaaccctggccacttcccggagagggagaatggcaggggaggtttgactggttggagcagtttttgaaccggtggagaaggacgaggggtgcggtttaaagtagaagaaaccctgaatatggggaacctattgccagaatctctgagatacagctaaagcagtgttaagaggaaagtttctagcactaaatggcttcatcgagaagatagaaagatctcaaattaacaaactaacttcacctaaaggaactagaaaaaaagaacaaaccaaccccaaagccagtcaaagaaaagaagtaaaaattagagaactgaatgaaattgagatgcaaaaatccatacaaaagatcaatgaaatcaagagttggtttttcaaaaaaataaaaataaacaagatcattagaccactagctacattaacacacaaaaagagaagatccaaataagtatagtcaaaaatggcaaagatgacattacaaccaatccacagaaattagaaaagattcttagagaatactgtgaacaaatatatgcacacaaatgagaaaatctaaaggaaatggataaattcctagaaacacacaatctcccaagactaaagtaggaaaagattgaaatgctgaatagaccaatattgagctctgaaactgaatcagtaatgaaaacaactaccaaccaaggaaagctcagggccagatggattcacactgaattataccagacatacaaagaagtaatgacaccaatcctattgaaagtattacaaaaaaattgaaaaggaggggatcctacctgactcattctgtgaagccagcatctgcctaataccaaaatctggcagagacataacaaaaaaagaaaacttcaggccaatatccccgatgaacatagacacaaaaatcctcaacaaaatactagcaaaccaaatccagcagcacatcaaaaagttaatatactgtgcttaagtgggctttattcttgggatgcaaggctggtttaacatacacaaatcaataaatgtgattcaccacataaacagaattaaaagcaaaaactatatgatcatctcaatagatacagaaaaagctttggataaaatccaacatcccttccataagcgaaaaacaaataaccccattaaaaaatgggcaaaggacatgaacagacacttcccaaaaaaacacgtacaagcagccaacaaatgaggaacatttcaatatgttcctcatcactaattaaaatgaggaaaattttaatatgttcctcatcactaatcattagagaaatgcaaatcaaaatcacaatgagataccatcttacactggtcagaatggctattactaaaaagtcaataacagtgctggtgaggctatagagaaaacaacgcttatacactgttggtgggaatgtaaattagttcagccactgtggaagtttcttaaagaaaagtttagagatttcttaaagaacttagaactaccatccaacccagcaatcccattactgggtatatacccaaaggaaaatagatcattatatgaaaaagacacatgcgcttgtatgttcgtcgttggactattcacaacagcagtgacagggaatcaacttaggtgcccaacaatggtggattggataaataaaatgtacatatacaccatggaatattacacaaccataaaaaggagtgaaagcatgtcttttgcagcaacatgggtggactagaggccgtaatcctaagtgaattaaggcataaacagaaaaccagatactgcacgttctcacttgtaagtgggagctcaacattgagcacacatgcacataaaatgggaacaacagacactgcagactgctagagggagtacgggaatgggttgaaaaaactccgttgggtactgtgcttactacctgggtgcaatatgttcatatatcaaacctgcacctgcaccccctgtttctaaaataaaagttgaaagaaagagaaagctacaccaaaacctgaataggacatttgttacaatgaagtatttgacacatcaatatttcttttcttcttttctgcctcaccctgccctgccccgccctaccttgccttgccttgccttttttttttgagacatagtctcactctgttgcccaggctggagtgcagtggtagggtctcagctcactctagcctagacctcccagactcaagtgattctcatgcctcagcctcccaagtagctgggactacaggcacgtactaccatgtccagctattgtttgtttttgcagagatggggtctcactatgttgcccaggatggtcttgaactcctggcctctagcaatctgcccacctcagcctcccaacgtgctggggttgcagtcatgagcgactgggactggttcatgtcaatatttcttacaagcatagatttaaaaacaaataaaataccagctcttcaaattcagagatatatagaaaggttatacatcatggtcaagtggtattcattccaagaatgcaaaggtggcttaacatttaaaaatcaatcattatgatccaccacaataaaataaaaatctcatgacctataggaagaacatttggtaaaagtcaactccttgtcatgattggcagccagaaatatattaataagacaactttcataatatgctagtctatctaccaaaattccccaaagctaaccaatggtcaaatattgaatggtttcttcccaaggtcacaggaatgagacaggaactactatcaccatctgtattcaatattgtagtggatatattggcaagtgctataagaaagtaaatgaaatgaaagacttcaggattagaaagaaagaattaaaaccaacatcataacatgattttatacttagaaaaccacaaagaatctacacagtatgaaaatttatatgtgaagcaattaaggtgctagttaatacaacgtcagtgtacaaaatcaattgtatttctatatgctagcaacaaaaaagacaaaccaatttttaaaatgggtcaaaactcgaataaacattgctccaaagaaggtatacaaatggccaaaaagcacatgaaaagatgtttaacatcatgattcaataggaaaatacaaatcaaaaccacaatgaaataccacttcacaactactaggtagatcagctacaataaagctttaggttatgtatcttcaccactacaacaaaaaacatttttaagctatactaaatgcaaagatagacaaactgactaaagtttcaaagatagatgtgtacatgtatgatccttttcaatgaagaaacgtcttttcagtaactagtgctgggttaattttatatgcagatggaaaaaaaattctggacttctaccttatattgtatgaaaaaatcagttccagagggattgcacatctaatgtaaaaggcaaaacaataaagatcttgaatgacaaggagaacatcttcatgaagttggagtaggcaaagattttttaaatagaatacaagaaccactaaacataaaggaaatgtttgataaaatgtactatattaagtttaagaacatctgttcatcaaaagacattatacgaggatgaaaaaggcaagccacagaattagggaagatattttccatacacatatctgacaaagagctcaaagtctagatgattaaaaaacaaaacagagcaacaatacaaaaaaactccttttcaataagaataaaaccacccaatggaaaaaaacagacaaaagatttgaagagatgattcccacaaaaggatatccaaatagccaagaaacaggaaaaggcattcgacttcattggtcatcagggaattgcaaattaaaccccaatgagacagctgtatttcatgttaggaaaagcgctaaaatgaagacacaagccaaagtggagagcacatggaagtggaaactaatacaaccactctggaaaactggcagcgtctgttaaagctggaaattttcacacctatgacccaggaattccaccctaagtacacacctgacagagatgtgtacatgtgtaccatgaagaccatgtgcaagtatctttgtagcatcctatttgtaatacctttaaactggtaactacccaaattccattaacaatagaatgaataaatgaactagaggtcatccacatatcaaaatactctgcagcaatgagaataaactcagtacaactacatgcaaccacaaagataatgttgagggagaaaatctacaaaacactgcatggttccatttatgtaaaatgaatacatataaaggggatatatatatatatcaagcgaaaccattcgatgctgttagaagtcccatcattcttggtgaatgtagtgactagaagaggctcaaagagttcctggagtttttctctttctggtggtgttgacagtggtgtgtttggtttgtgaaattcattgagctacacatctatgatttgtgcactttctgtatgtatgaagtacacattactttaataaaattttccaaaataaaatcttattttcgtaaaaggacaatttaaagaactgtattaagtgaataatagttcaggttttacagatatgcgtgaggtgaatgaatgaccaatctttggagaatgtgcatgattagctaggcttcattctacacatcttccttagtggaatcccattccactttccaccaccttcatcctcaggcgcccccacgcaggccccttttctgttgcagctcagctggacagccccttcggcggggactccccttgctccttttgtgactcctggctcagaggaataagcctaatttgtaggctgaaagccatttgagagatgtggcatctttctcatgaacaagtgtgacttgaccaaggccatagaactggttagttacagaaatatgctcaaatacatatcaaacatcttgacacccaacattccatgccagtttggaaggtttcaaaaagaaatcccctaattctacaatccatttccagctcacctgctgtcgcattgaatattctgacattagggatccattgggtcatgtgtacatgtttcatctggtctctcttacagtggcagtctcccctcagtggcctgccacccacagagccacagaggggactggggtagagcaggccaggtgccatgaactgccctgtcttgaaccagggctggcttctctgagaccagcgatctctgtctaattgctgccttattccttctccaggtccttccaaccctcctgctaccatgaagattgcagtgattggacagagcctgtttggccaggaagtttactgccacctgaggaaggagggccacgaagtggtgggtgtgttcactgttccagacaaggatggaaaggccgaccccctgggtgagtgagccaatggagcagggaagctgatggagggcggcccgcccatccaggtagaagggaagcagtaggtgggagtctgggagcagaagtctgcagggcctgtgctctagctgggaggcagccataagtggtctaccttgaatcctgctccagtgccaacaggctgctgggcttttctggaataaattggagatcccctccccacctgatcatggggtggcattagggtcctggagaagggctatagagaagcccagcctggtcccaggtcccacacagagcttctctgacccagcacccatgattgggaaggtctccatgttctgaactgggggtccatattctgaaaggtgggcatgcgcggcatcaccattgctggggctgccgtcaaaacacatagtgctctacttacccatcaggggagagaccatgatcacaaaggtggttttcccagggcgagtcttctccattgtactctggatgtgctgatccctgcaatttccccaaaggtgggaaactcgacttcataatttgtggtaatggggaactgcatttgcactctcccctggcattttgtaaaagaaaagaaaaaaacacagagagtactaagcgcaccctgagagtttcggattcagaatgaggtggaaaagtcagaattaggtgaaattgttaacctgggacaagttcctgggagatactggcatctcttgtactaggaaaagcacgttttgagaatcatgggtctgggtcactgcctttgagctgggaacctcagcagacaggatgcaggggcctcagcttggatgaacagaccctctaggaacactgactggtccttctcaggcctgatggagacagactgtggggcagggcttaaggatagagggccaggattaggaaagggggcttgtaggcctggccaggcacagaggtgtagtttgttaaggaaagccagtctccctcagtggggaagctgcagcctggccctagaatcaactccaacactcaacacccaatgccagccaggcttcagtcttggacctgaccacaagtgacccatgacataccctgaccccaccacagcctgggtcctacacccagccactaagtgaccactgaccccagctgctgaccctggacccagaccaggcctggctgggactcctacttggccttgatctcagatgtcctgaagcagtatttcattggtcactgtgggacagcttttgcaagtgcagtccaatctgctgacatcacatcccaccctctctcaaaactaccagacaccaggacagagtgacagaggaggagaccggagaggagagccagtccagtcagggcccaaacatcacaccagaggctctaacagagaactgaatacaaagaagtgttccttgggtattgaagagtggaaggcagagagcccaaagttattggggacagcgactgcaggaagcagctgccactgtaaggctaagataaaggaggacgctttaactataaaaacttgggagcttgggcctgtaatccagacctgtgaggagggtgtgctggtgacggggcaggaggaggggccctgcaggctgtatctggtcctctggggtgtgtgtgtgtgtgtgtgtgtgtgcacgcatgtgtgcatattgaggctagttctgcagatgatggaaaaactgatttagccattgctctgagaaggaacgactgtgactgggatgaagaagctgggctgggggaggctcacaggacaggaacccactggacagaaaggagtggggatgccctgttgcccttcttccccttcttcctccatcagggaacagctgacaaagcagaaatgccatctgcaggggggcagtccccatcacagagtgagcagtagagggggccggaagacagtaactcagtgacggggatggcaaggcctcaggagaggaatgagggcagaggtcagccatctgggttctggaagagggaggcactcagaggtcctggggttcagcaaaagtcaggatgcaggcagggcagtccccagagcctcatgcttggctggtgcatccgtctgtgttgcccagtggagcctggctggggtgtgggtgagggggcaggaatggagagaagtcctatgagctgctctgctgggaaggcagaggtggctgcgtgtgggtgggttatggagaggggccagtttcttatccaccgtcccacaggtctggaagctgagaaggatggagtgccggtattcaagtactcccggtggcgtgcaaaaggacaggctttgcctgatgtggtggcaaaataccaggctttgggggccgagctcaacgtcctgcccttctgcagccaattcatccccatggagataatcagtgccccccggcatggctccatcatctatcacccgtcactgctccctaggcaccgaggggcctcggccatcaactggtgagatggggcaaaaacacagggggccatccccatacatgtccctccatcagcctgacttgtcactttccattagcccaaagcatttctagggctgcagagtgggcatcgtgcaggtgcctgtcctgtggctgccagatgtcagccacagaacaggctgtgcaacgttatcaatgagtgaaggctctagagcactgggagcaggtgttgctaagcactctgcattcccacagttattggagaagctggcactgtcagtgttcccatcccccagctgagacagagagggcaccagaaggcgcagggacagagagggcaccaggaggcgcaggggccagggtgccaccccaggcggtgggctgggggtcctactctaacttccactgccgctgctctgggcagcacacttcgtagaaagagataaagatggagcaaaggatggcctccacaaggtactctgaggggacagaattcccaagacaacaaatggggtgacaaggcagatgggtggtcaaagagggaagacatttgagttgagaaaagagagtggatttgtagtcggactggtctgttgagattcaggctctctgatctttgtgggtgtcgcttcacttttctgggccttagtttccctatctgtaaaccgagtatacctgttatccctgctgtgaggactcagttacataaggcatatagagcttttagcacaattcctggcccatggttgttatcaatacatgctgttttccttcttccgtttcccgccggagccggtgtcagtcctacccctgggaagagagggcctcctggagggtggcaggtccacgggcctgtacccaggacatcctccgtggcccttcatcgtggactccaggtttcactcttctgcttcctaggaccctcattcacggagataagaaaggggggttttccatcttctgggcggatgatggtctggacaccggagacctgctgctgcagaaggagtgtgaggtgctcccggacgacaccgtgagcacgctgtacaaccgcttcctcttccctgaaggcatcaaagggatggtgaggacctggagccggccgcgccctgcccgccccgacgcaccctcaagcatcctccctagacccagcccaccgctcctggaggccaggaatctgttccccaaattcaggattctggagggagaggagctctcacttcaaggtttcagaggcaggattaggacaaacagtgtattgtattaggagggaatcttgctcacaacggacagaacccagctcaaaaagcgtttggcaaaaaggggacattttggggcccgttcaatagacaaggaaggctaaaggcagggactgggtcacaccctgctgaatccaggagcttcaattatgacatcgttaggattctatttctctctccttcactcgttgattctccttttctctgtgtgatttgtttcattctcagtttggctgccctgaattagaggaaagatagccactatagctcaaggattctaattcttgattccagggaaagagaaacactttttctcctagaattcatcaatcacaaatcaggggagattctgattggccagcttgggggtcatgtgatcctcatgagccaatcaccagctggggtgatggagtgctctgataggctgtctccgtcacatgcttcctgctgggaaggccgtgacctgtggtcacatggcctgagcggcagggcggctcagtcacctgggcagctggtactgctgagaggcagggtggcaggctatgggccggagcccacagctgcaggaggggcccggggatcatatgtgagggctgcttgcccctgcccgaggacaggctggcagggacggccacaggcagaggtgctgtccaggcatgcagcaggagggaaggaggccctggggagcccttgctgtttgggcgcagcaggaagagcagctgcagtgtccactgtcccctcgtcctcctcagctcctggccactgccttttatttttcggttgtgttaaacttgtcttccccacagattgaccagctcacaaaaatagtgaacaaagtagagttgctggagatttagtggtacagagagggagcttacctgtgcttcccacggcaagcaactcaaatactccttgaagctgcactgtccaacaaggcagccactggtaacatgcagctattaaatcaattaaaatgaattatactgaaaaattcagttcctcagtctcagccacattctaagtcccctggccaccgtgttggaccgtgcagacttggaactcatccatcaccacagagggctccattgggcagccctgcctcagatgctctgacacccggtcacttcccattcttggcacctcccggtctcttccctcaggctcttgctcacgtgggcccagactccttggctctccttctccctctctgattcctttcccaccaccttcctctttcctgtcacagagaaacaacttcctgcttcatctcagacctccaaacttccaccttcaagcccaccacggggctcaggacccactctctttaaaggcagagaaggcttagacagcaacatggacatttgtgtctgtgttatacctgcagggctttacagtttatataatcatctaagatatcagaagatgtaagatctatgtaatctaaacctttgccaggtagagaggacgggtctgtgtccgttgtgcaatagaagttaggttcacgctgactcccttgttcatatggcaggtgtttcttgggtgactgctgtgtaccaggcaagtctggtcagtctggggaagggtccaggctcaatgtgggccctggggctgggaaggaggcagggtcctattgctggggatagcaacccactggatctccccaggtgcaggccgtgaggctgatcgctgagggcaaagcccccagactccctcagcctgaggaaggagccacctatgaggggattcagaagaaggagacagccaaggtgagtgctgggtccctccacaccctcatcctgcctgtgagcagactggggttgtagagggcagcctgaggaggctggggttcagcccagatggtgcaggttgtaattctttgaggccagaacacagggcagcccaggtcagggatgcatgaagagagccgtggaggaggaggaccctggcacctgggagggtagcgaacagggtccattccaggttctttcctgttcctctttaggaggaatgggcagacaaagcccacagggagataagagtgggagttagggggcaaaacgtcagccgtagtgcgagcagtcttcaaggcaaggtgtgagggacagtgcgggtctctggagcaatagccagtggaggagcctcagaagcctgtaggctgtgtctcagctcaggagtatgggttgctgtgtggggacccacaggggccctgccagtgaaaggttgggccctatgggacgggcctgagtacattgtgctggggcctctgtgtagggtctgggccatcttgacagcaacagaacattatcttccccaaaccattctgaagtctgctcagcccatgagagactgagggtcagagagcacccagaactaggggcaccagctcagggactcctgcaagtgtctaagaggaagctggggttaccagctgtctcacaagagcttggtccactgtccagatgtcatcagggtgggaggggagtgaggagagaccagctgagcacacacaccttgctccccacagatcaactgggaccagccggcagaggccattcacaactggatccgcgggaacgacaaggtgccgggagcctggacagaggcctgtgaacaggtgtgtccctgcatggctggaatccagccacgtgcattggtgtatcccactggccattaaactgtcacacatgtttgaactggttggtataataaatagctactgccctggcccctactcccactgggtgccccctaaacatcccagcctttccccaggagtgagagacctacccagcctgcagtagctaaaggatagatgtcctgcgtagctggaggcctccaggcccttgtagtgcccctggggcccagctgtattggtggtgaaatattttgagtctcaccactgggcttgcggagaccccaggcccagtactcactctgacttggcctcaggcagggtggagcagcacattcagggccaggctgaccgtgggcaggccagatgctgaagatggggagacttgggggtcacaggctctagtgaggcatcaggggtggcgggactgtgtgtggtggactttgtgcaaaccttgagggcagtcttgtcccccacacagtctcagactctccagacccctgacccccagccgactgcccagactgtggccagaagcctctctgctgtcctcatcaacgcagagccctttgtactagcaaatgcatcttctgatcaaagcaaccactccttggcagcaccctgaaggcaggtagcctcattccgtgatgcctggagcacattctcccccagtctgtgcacctcaggtctgaggccatgggccaaggagaagggtcttatggcagagttgaggcagacctgccatcagctccctgaggccactgaggctcctccaggtcttgtttgtgccccaggagaaagggcctcaggggtcacatgggctttgagccggctcccaggtctcagctacccctggcccctctccctctcccagccctgctcagacctgcctgggctactggcttcgggggcttcttctcacccaccatcttctgatatttctccccttgacagaaactgacatttttcaactcaacgctgaacacttcaggcctggtgcccgagggagacgctttgcccatcccaggagcccatcggccaggggtggtcaccaaagcaggactcatcctctttgggaatgatgacaaaatggtaagggcacggctgtgggtcacttgcctgctcaaagccacccatgctcctgtccttggactcaggcctcacaggaagaccctaggctcctctggagaaaatggaaaaaaccagacccaggaaggaacactgaccctgatttgtccctgaccacccggctggtcctgagcacagggtgtccgaggcagtttacccacttctctgttctgggaaagctgggctccctacccttcctggctaggcacccatctccaggctgagtgccctgtgtgggtgtcaggcaacctagaatcagagagaagccctcccagggagcctgggttcagggcctctctttggtctatcagaaacacctctgggtgtggggtcattaagcctctgtgcctcagctcccatctctttgaacggcgatgccatggtaacttagcacgtgcagagccttgggagccatgccggccacctgctcttgttattagcagactacaactcacggtaccagcaaacactgatggagcaccttttataccagaacaatgtatatgcgttaaatttaatctgcctaacaacactatgagatatgtataaatattatatccttatagaggaaaaaaacagagatttaaataacttgtccaggatcatccaagctagcccgtggcagagctgggattcagactctgaaattctggctccaaagccgtgatgctggtcttggccatggtagcttcctgttcatatgcactctactactccttctcacatgagcagccgggggtagggagagggcaggcagggatcttcccacacactgacagggtccggacaaaccccatgggcgtggtacccccagccgtgttgctgtgtccggcctaccagagtgaggcgtggcagtatggggcctggcctttgctcgctcttggtgtccagtctgccatgctcccctgtcagaaggtctaggctgctgttgatgtctgcaatgtagtgttttgggtatccaagattgatatatgcagttgcaagagaatatctgtctgtggtcaggttccctagaagcagcatctaaggtaaaaattcttgtgcaagtgatttattgagggaatgttccagaaaatcatgcgaggcagtaagggcagaggaaagcaaagcaaaagtaaaggttcaggagaagtctagcctggggctgctcccagggtgggttttggagtattaactgcaccctccaattatacctgcctgtccccacctctgtcagcctttggtttcagtggcccctggggtggggtggaggacccaccaggcataatccctcggcctctttgtgtacaggagctcttatccatccacagcaagcaaggatgggacagtgcaggccgttatcatccagcccttgctgcagctggaggacagggcaccagccacaggggtctgagcagggcacccacagcatctgtccagagacctgcaaagacaggaatgcaaagaaggcaattaagtgtcttaagaggaagctggggttatcagctctctcacaagagctttgtccactgtccagaggtggtcagggtgggaggggagtgaggagagaccagctgagcacacacaccctgctccccacagatcaacccagaagaccctgggttgaagcatctctcagccacgccctgtggagtctggctgggctttagcttgcagaaagctccagaacatctttgaaaggcaatggggcgagggtcaggccgagaggcaagttccagttctggcagagcatgcatacagagtaccattcttacacagccactcttaacgcacagtgacatgcacccacccatgagcttatccataactctttttgtacatgtgttttttttcctggcccctaacaaaagcatttgttgaaaaactattgataaacaagcaggccccaaacaattcaaacatcttattaaatacagtaaatctgaggcagacactagagtagcccagagtcatgagctacaatgggggcagttcatgtctggcagccagaatccccttgaactgatggctggacgcaggctctacctgggaccagcttgaagtgctatcctgaagctgcagactgcagggccggccagaccctttttcagcctctcctcttcccacctctgtatcccacacaggcatctggtgatgttctccaggtgtttctgtggcagttctgggagctactgggtgattgcaagattagtttttttttctaagttgactttctatgtggtgcctgaatgacgttttctttttttgttcagtaggaatccttttttatagaagtaataaagtcattacacttaaaaacaaagtgaaagtgtggtgggagtgggtgatggaaaatcgagcagctggtaggggacacaagctctgcaattccctctgtgtccctggaatagtggcctccccactctgaactcatcactaatctgagactccctgcttcttcctcatctgaaggttggagacaaggctggagcgcccagcacagcaccccttgtgggacaccttcatcactgcctcaggtccgaccacaggaactgtgaaatccttccttttggccgggcgcagtggctcatgcctgtaatcccagcactttgggaggccaaggtggatggatcatgaggtcaggagttcgagaccagcctgaccaatgtggtgaaaccccgtctctactaaaaatacaaacaaaaattagtcgggcatggtggtgcgcgcctgtaatcccagctattcaggagggctgaggcaggagaatcgcttcaacccgggaggcggaggttgtagtgagccgagatcgcaccactgcactccagcctgggcaacagagcaagactctgtctcaaaaaaagaaaagaaaagaaaagaaatccttccttttgcagctgctggtgaagaatattcagctggaggatggcaaaatgatcctggcctcgaacttctttaagggggcagccagcagtgtccttgagctgacagaggcagagctggttactgcggaggctgtgcgggtaagaggcaacttcagggctgccatccagttgggcaggttgtgccgtgcacatgtgttctgcaaatcacactccccagagttgggcagcgccagccctctgtgggtgtctgttttggctccaggtgcagtgttggttctatctcgtcttggagctttctgttgtcttcttgctgctccttcctctgcaactggggccctgggatctggccagttcagtctgactcttctaggggctcattgtcaacacttaataagtgaaacagaagctcctggaatatttgaaagagtcaggtgtcaagcccatgtccctgtgattagaatgtgagcactggagccttccagaaaggctgcaccagaggcagcatcccgggctgtgaccaacacaagctgcccataaggcacacctggtctccaatccagctttgccccaatatgatgctgtagggagctttcgtctctaagactcagtcttctcaacatgaatttccatccatgctcacttcctggaatttgttcctgacccttcatgctccctcccactgtatccttcttccctgggtggagagaagagatctgggggaagaccttcaagagagaaggaacagcaaatggcaaggccctaacagggcagaggcctccctgtgttcagggagtcaccatgggagggcactgtagctggagcccagggggtgaggggcagagtcaggtgggcacagctggggaccttgggtgttaacagcacatgtgcggcaaggctcagcaaggatggacatgaggcatttgtgtgatccaaaggtgctgagagccagcaacttccttcttgaaagtggaacaccttgaaggtctgtttaaaaaaaatcctatttattccaaagatatccctggagcagttgctctggccctgacttggcctgccctggtgttgcagggccagctggacagacagccctcctggagcccacagctgagtggctctggggatgagctggggtcatcgtttgtagatgtagacctgagtcaaacgatgctatcttacaacagctgcagccaagtcctgcatctgtaaaatgggaataacaagcccttcctcaatggaggattggtagaggagataacacacatgaagaggtttagttcagtagctggcatctttgaggaactcagtacacatcggcaatacgtctaagcatctcatgagaaaagcagatacttctggagtgtgtactgtggacaaaagttctcagaaaatgagtttggagaacagagactttattccagtgaccagtttgcaaaccgtccaaaggcagcttctggtgtaacaggaaggtgcattcctgagaacaacgggaagggtggggttttatagcaaaagctctcacccaggttcccatgcaaaggaagggttgaaaccagttctaattggttggtacagctgagccctgattggctggttcaggtgagctctgaaagactcaaagataaaaaggtgcaggttttaggggaacctagagtacatgtgtgaccccctagacagcaagtgtccacttggctctgttttaaatttaggcccagtttgctgctggggatccatcttgaaggattggctatttcaggtttgcatttgttcaccgtgcacattcagagttccagatcctcctggaagagcggcgtgtttattcatgataacaactctatgcagtaggtgccctcagtacctgcaggtctcagctgtggagccaaggcctgaggagtggagtccgggctctggagggctgggctcaagtcctcctctagctgttcaccgtgcagccccctaaggccatcgctaggatggctatcattaggcctcttgctcacagctgcactcggcctccaggatgtatggtctggagaccgatgtgatagaggggacatggccaaaacgaggggaggccagtctggggctgtgcagctccccggtgttggtggaggggcctggcctgtggctgttcaggagaacgctccaagagcctgctgtgggctcggcaggtagtgggccacaaccccctatgccttcatgagctgaggctgggcagttgctgcccatggcagaaacgttgtgtttgctgactctccctgtagtccagactctctgcctgcctcacacacggaatccttacacagctgctgtcagcactgaggggctgcctgcattttcatggcttggtgggctttggctttgtggtgcactcagtgaccagtctgccgcactgcccctttgtggctccactctcatctgataagggccctggacgctagcaggtgccatccagtaggggacaactggtggccccaagcggtgtggtctgaggcaggtagatcctgccagtagagtagccagcaaaggttttggggaagaggtgacacaggaattggacccttaaggatgcccaggacttaaatattagctggggagtcaggggaaggtgtcgccagcaggtgagagcctagcagagacctcgaggggcaggcagcaggtgtgtggcagacagtgcgtggcttggtgtggtgttgatgctcgccctgaggatgggaagggcagatccatgacatttttccaagaaagaaagaggagagccgggggtgcttgtgccaggggttgggggaactggttctgattgggcctggaccagcatctcatgcctcacccccaacctgggcccatgattgacaatggcctggagttcatccagagagtggggacctggcctgatattgctggggcccctcctgactcctgccccactgggcctcaccagcagcctgcccagagagcagtcatcccatcttgactgctggacagccttactgggtgccttagtgggagctgagcacccacatccacagggccagctggctgggcactgctgccctccataggtcccagactgaatccttcagaggacacagaccagttagcatcttggtgaggtcaagacccaggtctcctgaacccatctgtgagcctcatagtcaccttcaggcccaccctgtctccagcctgctgctacaacacccgggcatcggtgtcacactagggacaccagaacctgggcgctagcaccaaggtgagtgggggtcaggagcagctgggccccaccttcctagtccccagccatgcctagaggcctggcacatctgtcctccatcagctggactgtcatggggaccccagagaagctgggggttgaggtgaggtgggcatgaggacagcagccagcatcagagggccctgggatgtggcagctccttctttcccagaaggtggtcactccaggaccattaagcctcctgggatgaggcaacaacttggaggtacatagagaagcccagcctggccccaggccatccatgagtctgttcaggggttgttgtcctggagtggcacttgtccccagctcccctggggccagcctctcatcaggtcttgctttgcagagtgtttggcagcggatcctccccaaagtcctggaggttgaagactccactgatttcttcaagtcaggggccgcgtctgtggacgttgtgaggtaaggccaggagtggaggggtcctgtcccaggtacttggtgctgtgtcacaaatctctgcaaaactgagcagcaggaaacaaccatttgttacactcatggatcatgtgggccagggacccaggaagggccagtgtgcaggtctgcgtgcacacatggtgggcagcacaaatgaatggttgcaggtctttatgcaaatgttaagggggcgtagttgcatgcagcctctctggggaagttctaggagggaatttgggaggagttgattcagaagaacagtactgagttcatagggagaattagggttatgtattgtgccaaccatttgtgctgtgcaacaaagcaccccaaaacattgagatttaaaccaacaccatatccttagctcacagtactatggttcgacagtttgtgctgggctcagctgatttgcatcagattcagctgctgtcagctgggctcacataagggcgggatctgccaggtcagctgggggctggctggtcctgtggtggtggtgggttccaggagggagagcgggagcccagggagggggtctcagagtgagcacgttgtgttcattgcattctgttggccaaaatgagtcacagaacaggtccagcttccagggttggggaaagaaactccacatcttgctagcaggtgctgcaccttcacatggccaaggctgtgactgcaggggtgggcattgtgaccagttttgcaattgaccatgcatatgagttggggctgagtgggctgagttgggcctatgtgcttggcactgtggacctctagtaactcactgtgaggcagtatgcagtttgtaataattgttttgtaaaaaatatgccaagaagaagaatgccagacacctgagagaatggtgtccagaggccaggccatgccttgtgtacagctaccgagctgaggatgcaaagaaagcaaaactgcttttctgtaaatagttaagagtatatgtccttttaaaaaaaatgtggcaaaaaaacacataatacaacatctaccttcttaaaattatagctgtatattgtaggattgttaactatgagcacagtgttggtcagcagatctttagaactttttctcgcacaactaaacctttctgtccgttgaacagccactccccatttccttctccctagccccagcaacagccattctttttgctctgatgagcttggccactctagtacttcatacaagtggaatcatgcagcatttgtccttctgtgactggctttttacgcttagcatgatgtcctcaaaattcagcccttttgtagcacatggcaggactgccttctttttatggctgaatcctatttcattgtacagatagaccatattatctgctcatctgttgatggacatttgtgttgtttccacatcttggctgttgtgaatcaatgtggaagtgcatgggaatttgagatcagttcttttggacaaatacccagcagtgagattactgggtcatatgatagttcttcttttaattttttcaggaacctccatatcattctccacagaggctgcaccattttacattcccaccaacagtgcacaaaggttccatttttcccatatctttgccaatgcttactttcattcctatcttccttcctctccccttttcttctttccttttgaacaataaccatcccaacagtgatgagatggtatctcattgtagtttttattttcattttcctgatgattagtgatgttgagcatcttttcatatacctgttggtcatgtgtatgtcttctttggagaaatgtctattcaagtctttgcccatttttaaattggattatttgttttgtttgctattgagttgtaggaactccttatatgttttaggaattaacctcttatcagatacatggtttgcagaagttttctcgcattccatgctgattgtttcctttgctttgcagaagctttttactttgatgcatatgacttgtatatttttgcttttgtttccagttcttttggtgtgatattcaggaaatgattgcaaagaccaatgtcatggagactttcccctatgctttcttctagttttatagttttaagtcttaagtttttcatatattttgagttgaatatttttatgtgtggggcaagataaggatccgatttaattattttgcatgtggacatccaatctttccaacatcacttgttgaagggactatcgcttccccattatgtattcttggcacccttgttgaagattagttggccatatatgtttaggtttatttctaggctatcttgttcattggtctatatatctgtgtttatgccagtatcatactattttgattattgtagttttgtagtaaattttgaaatcaggaaatgtgagtcctctaactttgttctttttcaggattgtttgaactattcacagtcccttgatagtccatatgattttaagatgatttttgtaatttctgcaaaaaatcacttgggattttaatagagttggcataaaaattgtacataactttgggcagtattgtcatcttaacaatattaacttctccagtccatgaacacagatggctttctatttatttagatcttctgtaatttttttcagcagtgttttgtagttttcattgtacaactctgttggctacttggttaaatttattcttattttattcttttgatgccattgtaaagggaattgttttattaatttcctttttggattgttcattgctaatttatggagttgcaactgtttttttgcatgttatttttgtatcctgcaattttgctgaattcctttattagctctaacagttttttggaggtgcagaatatttaaagttttctttttctgttttttagacatggtcttgctctgtcacttaggctggaacagtggtttgatcatagcccaatgcagcctcaaattcttgggctcaagtgatcctcctgcctcagcctcctgagtagcaggactgcaggcatgcaccactacacctagctaacttaaaacaattttttttacagacaaagtcttgctatgttgcccgggctgattttgaactcctaggctcaagtgatcctcccacagtgcttgaattacagggtgaggcgttacacttggcccatttaaagatttctacatgtaagatcatgttatctgtgatgagatatgatttaacttcttccttcacaatttggattaatgtttctttcttgcctaattgccttggatggaacttccagtacagtagtctccccttatttgtggttttgctttctgaagtttaagttacccatggtcaatcatggttggaaaatattaagtggaaaagtccagaaataattcatacgtttttaaattgagagccatttgatagaatgatgaaatctcatgctgtcccgctccatcccacctgatacgtggatcacccctttgtccaggatatccatggtgtatgcactgcccacccattagtcacttagtagccactggtgttatcagaaaaaacatagaatatatagatggtcccagacttatgatgcttcaacttaggattttttgactttatgatggtgtgaacatgatacgaattcagtagaaattatgctttgtgtacccttacaaaattctgtttttcacattcagtacagtgttcaataaattgtatgagatactcaaaactttagtataaaataggctttgtgttagatgagtttcccaactgtaggttaatgtaaatgttctgagaacatttaaggtagcctaggctaagcgctgatgttcagtatgttaggtatattaaatgcattcatgatttaacattttcaatttataatgggtttttgggatgtaatcatatcataagtcaaggagcacagtgtaaggttcagccctatatgtggtttcaggcactcactgggagccttggaacaaccccaacccccgaccctgcccgtgggtaaggaggaactactatagtgtattgaatggaagtggtgaaagcaagcatcctcattttgctgctgatctcaggggaaaggctttcagtctttcaccactgagtatgttagctgtggatttttcaaatatggcctttattatataaaggatgttcccttctattcttagtttgagtgctttttaatcatgaaaggatattgaattttgtcaaattctttttctgcattaaatgagatgaccatgtgtttttctcttcattccattaatgtggtatgttacactgattgattttcataggtgaagtatccttgcattccaagaattaatcccacttggtcatggtatgtaatattcttaaaatgctgctgaaatcaatttgctagtattttgttgaggatttttgcatcagtttccataagggatattggtctgtagctttcttttgctgtagtatctttgtctggctttggtctcagagtaaacgctggccttatggacagagttgaagatgtgttctcttctcagttttttggaagagtttgagaaaaattggtgttactttcccttcaaatgtttggtagaattcaccagtgaaatcattcagccctgggcttttctttactggaaagattttgattactgattcagtttccttactagttatatatctattcaaattttctgtttctccatgagtgagttttggtagattgtgtgtttctgggaatttgttcactttacctagttatcaaatctgttgccatataatttatcatgtattttcttatgatgctttttatttctgtaagattggtataatgtctccctttgatttctgattctagtaatttgagccttcactttttgtttcttggtcagtcagataaaggtttgttaattttgttgatattttcaagaaatctaaatttgattttgttgatttgctgtttttttttctggtctctatttcatttatctctgttctaatctttattattacttccttctgctagttttgggtttagattgctttttaatctcattccttaaggtgtacagtgtaggttactgatttgaggactttattcttttctaagtatgtatttacacctgtaaacttctttcttagcactactttccccgcctctcataagttttggtatgttgtgtttttattttcctttgactaaaggtattttctagtttctcgtgtgttcttctttgacccattaattgtttaagagtgtgctagctcattttcatatctttatggattttccagatttctttctgttatcgatttctagtctcattccattttgattaggaaagatattttgtaagagttcaatatttttacatgtgttaagacttattgtgtagcctaacaaatgatttatcatgaagaatgttccatgtaaccttgaaaagaatgtgtgctctgttcttcttgagcagtgttttgtacatatctgattggtttgtggtgttcaagtatcttattctcttgagttctatccatttttgaaagttgggcatctaagtagctaactactattgtagaaatgtccatttttgcttcatatattttagggctgtgttaggtgtgtatgaatttataattgttatatcctcttgcagcatcaaactttgtatcaatataatgtccttctttgtgtcttgtaaacttgttagatttaaagtctcttttatgttactatttgcatggaatattttctctatccttttacttccagctcttttgtatcattatatctaagtgattctcttgtagcatatgtatggatgctgggttttatccagtcatccaatttgtgccttctcatgtttaaactttaaatagattaaacaggagagtttaatccatttacatttaacttggttactaataaataaagatttatttctgccatttgttttctgaatgtcttatttttttgttcctcagtttctctatactgtccttttttgtatttggtaattttttttgtagtgtatcactttgattcccttctttcttttactgtatgtttttagttatttctgggttgttacttagggattacaattaacatcttaaatttataacaaggtagtttgaataatatcaacctagcttcaatagtatacaaacactctcattctatacatctcttttccttcccctttatagtgttactgtcacagtgtacatttttatacattgtatacccattaatatatatttaaaattattgttttatgcacttgcctattgtcatataggaaaaagagagaagttacaaaccacaataaaatacaataatatggactttcatacttacctatgtagtggcctttacctgtgttctttatttttaattgtgtcatcaagtctatggtacttttatctcagcctgaaagactcttttcagcatttcttctagggcaggtctactggtaaccaatttcttcagcttttgtttctatagaaatatcttaatttctgtttcattcttgaaagatagttttgatggatatggaattcgttgttgccatttttccccaaaacttttaatatgttatccaactgctttctggcctttaaggtgttttagtggaagtcagcttttaatcttatcaaagacccattgtatataacaagccatttctctcttgctactctccaaattatttatttgtctctgaatttcaacaagctgggtgtaatgtgccttggtgtggatctctttgatcctgcttggacttcattcattgtatgtcttagatgtgtatattcatttctttcctcatgtttgggaactttggggccactatttcttcaaatacatatttagagaaacctttttctcttttttcctctggagctcctgtgagtatgttggtgtgtttcatggtatcctataaatccttcaggctcttttcatttttcttcattcttttttctttctgcttctcagactggataatttcaagtttgctcatctttccttcagcctgctcaaaactactgttgaacctctttagtgagttttttgtttgtttcagttattctacttgccagctcaagaatttctatttgacttgttattatagtttctgtcacttcgatattctcattttgttcatacatcactttcttgatttcctttagttttttgtccataatttcctttgtctcattgaacatatttaaggcatttgacataatgtctttgaccaataattccgatatctgatcttcctcaggggtaccttcttcaaattattttttgttcctgtgaatgggctcttctttcctatttcttcatatgttttgtagatctttcttggtcataactggacattttgggtgttatgttgtggtaattcgggaaatatatttctcccacttattagggattattgaatcttccttgttgagggctagaactgtctgtttgtgacttttccaaattattttttgcaaggtgtgttccttattgtgtgttgtcgttgaactttctgttccattgttcctgcagtcagccagtgacctaacaaagatttccataaatgtctggctaccaaagtggagggaaagtattgccttttaaaatctcctagaagctacttcagcctgtgagggttgaaacaatgactgccagcctttgtgatagcttctcagcaatcaaaaggaatatcagtgctcaggacacaatgctggtggtcagaggacaaggtccttattgcccaccctggcttcagcaagctgcgtctggaatatgacccagccctgcttcaactttttgtggcagaggtgggaggtggggggtgacagccaatatcttatgagaggctgaaaatcatttaaattgattgacatttaccagcttctttaccagtctttctccttggtgctgaaagcatttgactagaccccaaagttccaacatatttgattcatgtaagttccatagttatttagataaggggatacatttttggagcttcttgttctgccatctgctgtctagacattggcctttatttcttttggataaatacttgagagtgaaataggaagtatgtttaattctttagaaagtgctaaactgctttccaaagtggtagcaccatttacatccctgccagcagtgtgtgcaagctccagttgctcagggtactacatctttcccaatagtgggaatggtcaggcttttaaattttagacattctaataaatatgaagctatattccattgtggttttaatttgcatttccccagtgcctaatgatgttgagtgtcttgtcatattcttatttgccgtccatatttctccttttgagaggcatctgttcaatcttttgctcatttttaattaggttgtttgctttcttagtattgagttttgagggttctttattctgaatacaagtcctttatcagataatgtgatttggaaacattttcttccaatctgtggcttatgttttcattcttttaacagagatttttggagattattattaatctgctaattattattattattagatgggttgtcgtatttactcatcgcaaaatagcagagcagctattattatttctgttttacaggtgaagaaattaaggcttagaggagttagtcatttgcccaaggtcacaaattagaaagtaatggagcgagaatttggacccgggaccatctgagtccacagcctgagcccttctccccagttctgggctcatggctacctctcggtgctgggatggagcctctctggggtgtttggccccactgccactgctgctagcgatgcaggcctgctgagcccctcccgtgtccccatctttccatctccttcctccaggctggtggaggaagtgaaggagctgtgtgatggcctggagttagaaaatgaagatgtgtacatggcatccacctttggggacttcatccagctgttagtgaggaagctgcgaggggacgatgaggagggcgagtgcagcattgactacgtgagtgctgggccctccctgcagcaggccctgcagagccctcaggcagctgcatctatgactacataagacaagaggggaaacctggacattcagaaagccagggccccaggagcccacccttcagtttcccacactctccctgcacccgggatagcctggggatgtcagtacagtggggccagcttgccagaggatgttgctgtctgatgctcaggacatgggccaaactctgagtcccaaggcaggtgatcaagatattaagaagagacttttagttcccactaaggaaacaaataatcctatacattcaacttgtgtgtatggaagtgtgacaagtaattgaaaatctgttttttaaggaaattaagaaatcttccttgagctatcttggtagactgccacctcccataagaatgggctttagcatagtttgtttggctggtagattggaacaaaagtgggtgaagtaaggggccaaggtggacctaagggtgtccttgggattgaggacaaatgactgacgaacagatttcaggaggaggatcatatcccagaggtgcctgggttcagggaggaattgccaatccacagggatgtgagtggtgggttgtagcatgtctggggcttgccaagggcttcactagccactggcattttcctctgtctgagtcctcttagcccaccctaaggaggctgaggagccagcccaaggtggcacagggagtaggtggaagcgcagagctcccgccaggcagcctggcctcagagcctgtcctttgtctctcccctgctcagctgttgcctacatgcagctctgaagccccaggaggcccctgggcagtgtgtgtgtgtgactgtgtggccatctgtgtatgcttcctgcaccctgcatgggtttgtgcttgtcactggggcctttctttcaggtggaaatggcagtgaacaagcgcactgtccgcatgccccaccagctcttcattgggggggagttcgtggatgccgagggcgccaagacctctgagaccatcaatcccaccgatggaagtgtgagtgcaggcccagcaccccttctccacattccccagcctccctgtccttccttccctgcccccactggcctctgggggtcctgaccctgagagtctctgcttggacatgtgcctttgagagggacgggaaagaatgccaggtcgtttccagcccaccttactggagtggagtggagaggaggtgcagggtggtggcaggtggcaggagggctcggaagggtcttgcacctgcttcagagactgggaacagagttcctcctaccccaaggaagaaattaggccactgccacacttgcacacttcagcagtagccccagtgtgagactaccttgtctactacttgagccctccaccgttaggacattcttcttcgacctgagtcctgtgtttgccactccttcttgactgtgaccttgtggcatcatgagccaaagcacgcctatggtagatacacacgtgaacatatccaaaacacaggtttcaaagcagggcttgcttttatggctgcatactgacatttttctatcctgtccatcctatagaattggccaagtccttgcagaagacagagagcacactcaaaatgagtcatttgagaggagttaatgaaagactcatctgcaaagggagagggagggggtagggacacagacaggacagtgcggtgcccttgggacggagcatcaggaggggctgaggatggggccttggcagaaggggcatggctgtcttgtggcggcagacaggaggcactggctttgccctccctgggctgccctcaccacaccccaccggctcccctcaccacacccagcaggcaccaaggtgagggagcctgcacggatggcacactcagggcaggaacagggtggggaccttggggtgtagacacacaaacagccctctcccagggccctgtcttcccttcctgtgtaaaccctcccagggttgtcctttggccatgcttctcctccacacctgctcatgtggacaggggccgcctcactggggccccaggaggaggccagggaagcaggcaggggtatctgtgtgcaactggcttagggagaacttgtcatggctctgcttccactataggtcatctgccaggtatccctggcccaagtcaccgacgtcgacaaggcagtggccgcagccaaggatgcctttgagaatggacggtgggggaagatcagtgcgcgggaccggggccggctgatgtacaggtgggagcccaacatgtacctgccagccactgccaccatcagcttctgggcagtggcacgggggggacttctgtggaggcccttttacctgccaggaggagctgggtcctggggaggctatgggaccgaggccatcagatgggccaggctggggctccttgcctgaggctcagaaaaggcttctcagaggaagggatatgagaaacaggagacatttcagcagagtgggctcaggggaggtgcctggtggaggtgaggaggtgcggaagccaagggatgcttccaaagtgggcgcaggctgggcctcccaggcagacaaagcacttccctcaccagcctgggctggaggggacttagctcctgcacgcagaagacagcaagggccagagaagggctggcctggtctctgcttgctcagccaggctctgactactggaatctataggtttcacattttctattaaaaaaaaaaaaaaaatttaagccagggagaaaggggccttctctccttagttccagttcagacgtcttaggcaaggacttatgatgactttagcttatgaccttagagtgagaggaaggcctggaagagaggtgctgtgcccctggaaccacagggcctggcgggaaggagcagtcaccctcacagaggtggagtgatgttcctgggagaagagagggtgcggccagatgagccgagaacacaggtgtcttggggcctggctctttcgctggggtcctgggaacgtctaggggtgcgaagccaagttatggcgtggtcccaacgaagctcctcacctggcaggagagaccctgccttggccttgcggtcagaatggcttctgtttctgttatactccagaggccagaaaagccggggcagcccagcagcaggaaactagagagaggggttgcaagagcatggtctgcaaaaccgaatggagattagggttggggcagggagggctgtgggggtcgggcatgcccagcctttcataggttccagtccccttcgcaagcccctcaattctagaaaggcactggccacgccaagtggtccctagagttcctggaggtcaggaagagctgtgaaacaagcacgacaggtggcgggagaacctctggcctgggccctgcgtgcgcgtttggtggaccgcacaaccaacagcgtgcgtggggtccctcccttggcctctgctgccatctggtggcttgtatcataacagattctactcacccataatgacagtgaggggggcaccctgggcagctgtaagtggaccccttcctgtcctatgcaaactctcaggccccgtgaagacctgggagtgcccattactggttctgcctcagctcagcacagcagaggctgggtctaggtgtcccggagggggcagttcaggagctcccagataaatggctgcagagcaccctgtcagggtggcgggaccaccgtgggtgttagggaacacgaaattcactgcaggaatcagacattacacaattgtggaagctaggaagaaggatccagagggagagttagacaaggttcctaggcagtcccctgaactcctggtagacaggatagaacctccagggagtaggagcagccgtatccagctgccaagtggggccacaaagaggagctcctgggaaagaccgtgggggagctgctggctctgcccagataccactgtggtccacggctgagaatctgacggtggtccaggctgctggtggtcagtagggccggccgagcctgctgggcacccctgcatctgccctgcagaccttcagagggagatggcagcagcttcacttctcctgcactgctaccctggcacccagggactgggctctggggagcatgggtgccagggtgtgaattcagcagcctaactgaattaacaatagaatagtcctgcaaggcagcctctcagagcttcccgaatagtgcactcgggtgatggatactttagaaagtgtgtcctgggaactggattgatgacacagccatgtcacacacaggtggaattatctagaaatgtgggggattcaaaggattggggctgatgaaggagaaggatgtgagcaggggaggcatggcacaccacaagctttagtgggctgcaggttgggtagggttgcaggagacgagcagtgagactgtcccaaggctgccgtgtgggcttccatgtccaggtgacaacacacagtgatgcagtgggagcctctgggtctgagggctgccaagggcagtagcagctttcaccttatcaccccaaggccctgttttatcaatgggcaacaactgctggttgaggttcctctgggtatgcaaagcagcgggccctaagtggctaaaaacgtacctgtttgggctactttaagcctaactgggagtgggaaaatttgagtttggtgccagcaggctttggagcaaatgggtctcatttatataacaaagaggcagctcctgtcttcgcagctggggagcctagtcctctatcggccgctaggtgatgttttcactatttgctgtacaaaatcggtttttctcaggaaccgatttacgcatgggctctccttgcccagggtggcctcgctcagttggttttatgcagcaaacctgagctgagtgcttcccagtgctgtgctggagctgggcgctgcagagagcagggaaccagacagcgccctgcctcctgcagcctggattccagtgggcaggcaaatcgtgatgaaattatcatctacctgaatgtctgttacaaactgtagtggtgggggagtgaagaaaggcagaggaggctatcagaggatgtgacagggagctctgatcagtcagaacatggttggggatttgggtcggcttcccattgagtccgtgtctgaaacaagtacagaaggctaagaggagaaacaggagtgtggaaagggggcccagacatgcaacacagcccctaaaagccaaggcaggaggcctgactgacctgagcacctggaagaggccgatgtgaggaggaggagggaggcagaggagctggggtcttgtggccccagaatgaaatggaaatggccaggagctgcttggccaggcacagagttgcagatgcatcctgagtggcgtggacagctgtcacgggtcctggtgggtgtaggcaggtgaggaccggagcaggcctggggtgcgtgtgggcttcatggtgcctgggtgcagaggggagcagtgtgggaaacggctggcaggctttggtcccacacttgcctctgggcccgagctgccctgtctccaaggctgagtttgctctgggcctgtggtctccactttccctgtccaccctccccctaggggatgagaggggcaccctcataactcccaggctgcccacagctgcacatccgtcagaatcaagggagggcaacccgacctcggcatgctcaggctgaagccagtctgtgtaaacgcgtcagcccccacgttgctccctagtcagcccttctgtgatggggatggggccacctctccatctctggagatgccaggctcaggagcatgcccccaccatcctggactgaacagttggtttattggtgctggaaagacagatggactttctcctggttcaagctttccgaagacaggaagggcagcctcttgggccatgacccctttgctgtctgcagcaagtgggtgaatgcctctgcaggataatttcggaggaataggataaagtagtggatccacaaatacttcaggaaggaagcgagggaagatcgaggaaaggagagagggacagagggtgtcatcctcacagctatccggtggagtaaacggtgctggcccattgcatggatcagaaacggaggtccgcacatctgagagtggcagaactggggtagagggcaggaccccagctccttgaagaagggccttgtgagggcagatgaggccgtgccaggcctgagcccacctcccgcttcccctcaccctggtcaggttggcagatctcatggagcagcaccaggaggagctggccaccattgaggccctggatgcgggtgccgtctacacgctggccctgaagacccacgtgggcatgtccatccagaccttccgctactttgctggctggtgtgacaagatccaggtggggcccaggctcccacccagtgtgagcacatgcagactggcccagccatataggagaactccaagggcagcacagtcatctgcatgctgcgcagcaaatgaccacaactggtggcttggaatgacacctgtttattagcttgtggtcctgcaggtgggaattccaggcaggctgggctgggttccatgccaaggtctcacaaggccaaagctaaggcgctggctggactgggccttatctggagactctgggacagaacctgcatccagacgagttcgggtgttgacagagttcagttccgtgtggatgcagggctgaggccgcaggtccttcctggctgcaggtccctgctcagggcactgtatctcccagcggcagcaggtcactctcgggcttgggatccctgtgacactgtcttctgcctgcttttctgggggctcctgcagttattctgggctcatgggcactatgtccccaccttagggtcaacagggacagtcaacacctcataggagggagtgtcaccatatcttcaggctcccgccatcagttgtggaacttgggggccatttgtagaggctccctggggaggtccacctctgcaggactcatggcgtctctgccagatcagatctgggctccatggttcctcctctccaccagggcatgacagcgacaagggaggtgggctgcctggtgcccgcccctactccgcagctgtgtagcttctggctgcagctggaccccccaaggcctgggccttctacatgtgctcaactgcttagagctgtggggagggggacacccggccctgcccccaccctcaccctttcttgctcgaatgtcaaagctagaggctttgctggtaccaggaccagcttccacccaagggctctgcctgccaggctcagagtggagcaaacaccttgcccctctggctgcccccctgcctgtctctcaagcctcaggtcacacctaagctggtcgctttgacttcctcctggagaccctggtggagacttgctgcctagaggggaaggggtgtggaccctgggcccctgggtgactgcccctgttcctcttccagggctccaccatccccatcaaccaggccagacccaaccgcaacctgaccttgaccaggaaggagcctgttgggtgagttcctgcccagggcgaggtgcagcctcgcggtgctttccatgcagtacacggaactgtagcacagcctgcgggagctcacagcaccctgtgcgtgcatttatcaaacagccatccatgtgcttcttgagcacctgctccatgccaggcattgttgtaaggacttgaggacaattgtatttaatctcccagtaacactggatcagtcaggtccacggtgggaaacaagagtaaacccaaaaaatgtccaaaatgggtatggtggtcagtgttcataaagatgaggaactcctgcacagcactgaggaacaggaaatatagaacaaaggaggaacaggcagaggacgagagctgctcagcaggaggagttcggaccccgctggatgccaagcatgtaggcgccgggaaatgaacctggcgtgaggcacctcacctcgccacccagtggccccagggcaggagtagggagaagggcttggaacacagccaccgggctctgggttttccctgctagaggaaactgggcagtgacctctcgaggccatacatcctgatttggccccagtcctggtgagttactcacacgcgtgcctgaggaggcttacccaagagtgcatggccactgtgctaggccggtgacagcaaacaccagagcagcaggtgctggtgcagccctgatccatgatctgcactgaggatgcgcctgcaactggacctagagagccccagccctgggtccaccctcactgcgcctgcacgcggtgccacaggagagcctggccagggtgacctgggagcagggcccagctggcatgagcaccacagtcattcccacctgctctgtgccccttgcagggtaggggacctcacagctgtgggcatggccaaaggcccctcagctccacctgaatgttggagtatttgcaaggagaacgtgctccaatgtccctgtgtcactgacagctcatgcagatgaacaaccaactcctcaagcacgggctggaggaggctcctgtgggaaagtgggctgtggacccttagagccccagagaggagccaggctgcaggtggaggcatcgcctccagggtccccacagaggacatcgggcaaggtctgcacatggttttggttgtcccatcagagggggtgatagagtacagccccccacaacaaagaactgccccgccccaaatgtcagtagtgtgggagccaagaaaccctgctatggggcagtggtcagagacctttgtcgtgctttgaaaggggctgggctgggctgggcagggcagggcgggtcgtggcccacctggggccacagttcagagccacacttgggtctttgaggctgcccacccctcccagctgccagcatggggttggggggtgtccacccccatcagactgaggaggaaacagacactgtgtcacccagaagcatccctatgtcaccctgtgaggctggccttggacccaggactctgggcgcctggtcagcaccccagtgtgaacacatcctgccctggggcctggtcccagcagctcacacagaccagggctcgcccaaaggcaggtaggcagggccactgctgaccatgcacctggtgggccgtgattctggaactaatggtctctgcctggcagggaggccgccagggcctctgggcttcacccctccccaccttcacaggggacctcgcctcagtgggaatgttctggagccggaacccaaggttggaatcccagctcctcccctttctagggcaagctcccagcctgtctgtactcagtctccccaactgtcaaatggtaataaaacagtcctgtcctcactgagttgtttggatgggtgagcatcaggtgtctagggcacagcatgctgtgaaggagttaggagggccaggtgaaggagccatgcagggccgggcctcctgggtaatgggactaagaggagaattctgtatgtggttctgagaaggagcagagtccagctcttttggatgtttgtgttaggaaatttactagagaccatgtcactgctccactcggaatcctcgggtggcttcccagtgcccttgacatggaatcaaacttctcgcttggccatgcaatccgggcctggtatcctggccccctccccagtccactgtggttggctgtgctggcctcacggatcccaggccctccaccctcatgccccactgagcacttgcacctgtgtcccacctccagccctcaccagctgtcctccagctctcatctgtgatgcatccgccagacctctgctcccagcctgccctctctaatctataatctcattttattctctgtgtgagcattcagactgatgctgccctgtgcccatgcctgtcatcatcccagcacacctgcagtgtcccataaatactgcagaatgactgagtgatcagagctagagagccccagccccgggtccaccctcactgtgcctgcacgcggtgccagaggagggcctggccagggtaaggggctgcccatctcctcccctggccagtgccaccgcaacctcagcagtgaggctgcagctgcctcgtggggagccccttcccctcatgtcttcagccgcaccctggcccaacagccactcgagctccctagtgagccaagcatttcttggggacaccaagaaaccttgcttggtgtcccctgcccaggctccatgctcccgagagagagaaggaactccaccctcaccgtccatgcagctccccaggagcgtcagagggcagaggagggggctcagggccgcacagcaggagaatggccccaagggagggagggacgggcctaagaaccatggggtggttgtctcactggatgtccactcagtctcccactaagaaagcccactaggaattagaggcagcaaggctaatgaaagtcggttttcacagcagctgggcagggaggattcacctgggcctgggtcctgcagccctgctcctttgaccccgtgccagggccagctctgcacactccagtcccggggctcggcctttcccctaaccagtgagtgtgggcgtcagttcgggctgctgtagaagagaccaccaatccagggcctaatcaatggaaactcgtctcctggttctgggagctggaaatctgaggtcagatgtgggcagagctgtttccacatgagggctgtgagggtctgtcctgacctctcttctggcatctggtggctgctggtgacctctggccttccttggcttgcagggagaccccgtctctgcctcatgccctcttggcattcccactgtgagtctgtctctccatgtggtgttctttgtatgaggacagcattcctcctaaattaggggcccgcccaccccagtgctaccacatcctaattaattacaacacagcaatctggtctccaagcaagggcatgccattagactctggagattagggcttcagcatacgaattggggagtgggggcacaattcagcacataattgtggggcttttctgatgtgttttcttttccgagctcccctcagccccgttcactgtaaccgacggcttcacctgctccctgggaacactcagcagcccgtgctgtgctcccaatctcctgggtgtgtgtggggtgtggggcagctcccctatctcagtgctccctgctgctcccccctgatgcctcacacgggtcctgcccaccgcctgtgtctggctaagcagctttcttttggggaaacacccagtgatggtggtggggtggcgacaggagcctgtgcgtggtctacggggctctgtgtggatgtcctcatctgactgtccagcgctcaaccaaagtggtgctgtatggggggaaggcagggccacacaggattcatacccggccagtgtgcctgctggtccctgggactctgcggcctccccagtgcccacggtgctctgagtatgaggcacctgtgcctggccagaggctcgctctagaacccagggtggcactgacactgggcaccatggcttcacacagagcaccctgacttcatcagtgctgccttgctgactctgtcttctcttcttgaggattgacacctggcctcacactctggaggaccctctccaggccctcctgacccacccctggtgacccctgaccctctttagctgaccctggcctgtgtcctcacctgtgcctgcctgccatcaccctctctcattgcctgtgccccagacagttccacagcttccatcagaaatggtccagtatcccatgccatcctgccctgctaggaagaggggctgctgccagaccaattcttactgtagcatccaggacagaaacagcaggcgtgagctgcctctcagagggaccttgggtgccttatcaggaagcctggctttgagagtggatgtcaggccctgggtgaggtggagggaattggcaggtccactgtgggcctggtggagaagaaggacaaaggccaacctcttttgtgtggcagggtttgtggcatcatcatcccctggaactatcccctgatgatgctgtcctggaagacagctgcctgcctggctgccgggaacacagtggtgatcaagcctgctcaggtgagcgtgggttcactctggacagggcctgcaggccacagagaggatcaggaactcactctataagggaggaagggaagggcctctcttggccacacgggcactggaagaagggtcctgctaatgccagctgccctccatgggccccactctcagtgggcagaggcgtatgtggcaggcagagctctccaaagcagactctttttcagccatggctgcttgaggccatctggctgtgctggaacttgcagctgctcgggtgagcagaggcagggatttctgcactctggattcatggggcagaaaccaggccccatgctctaagacagcctgagtagtctatccataaagctggtgccatgtcccttatgtggcttccgagaccagaagtcctggagagaagcagggtgagcggtgggattcgtggtccccatccctgcacacagaagctacgcagtgtggtgtctgagaggtgtaggtgggggagtagaggcgggatgtcaggggtcacccaggcatgctgggaaggtccttgggagtgaggacatacccagtgagcctcagtttctccatctgtacattggcaatgacagcctgcccgctgcctgcctcccaggatggtgcatgacatggcagggatggtgtgcccaggagggcacccactcgccagcttctttggggtaatttcgcggcaagggcattgatgtaatgaaaaacaataatgatggctgacattgatagtatttaccctgagtcaggcatgcctcaagcatttcaacatgtatcacaaattaggtagtaatttacatacatttgcttatttaagcatcacacacaaccctctgaggagaccttaacctctggctttagaaacttatgctgtgcagaagggaacccaggcctggccggctggagccctgccaggaggagaagctagggcaccagatgttggcccaccctgattcccagctggtgctgtgggcgcaccggctgggcaggcagggccccctctggtggctttcctggggtcttcctggtgccacaatctgcagctactctcccagcttgctgctgggctgctgggagaggaaggcggggagggaaggcagagccccactttcaaaaacctccttacccagtctcctttcctggccccacacccaggtgaccccactcacagccttgaagtttgcagagctgacattaaaggccggcattcccaaaggtgtggttaacgtcctcccaggatctggtaagagccattgtcgggggcagggctagggcttctggcagctggagatgccattgggcagagcaggccctactggatagtggcgtgagggcagagtagcctggggagagcccaggcgggggccagcctgtgacaaaggaggcccctcccatgggggagagcacctgcacctggaagggctttcgtcttcagatgccccagctgaatgtattccagtgtgtgtgtgtgtgtgtgtgtgtgtgtgtgtgtgtgtccgcgcgccctggaataaacttgttacttggggattttctgcccttggaagtttgagagaatttttctttagaacatttcaggcttaaagcatttagggaggtcatacatgaatcactttttaagtttttgttgtgtttagttgtctagtttatggaaaagtctcttcttgtgcagatttcaaatgtattagcatgaagttgtatataataatctcataatttttatctcctttttggattttccttttgattgttgtaatacattctttatatttttcctttttctctctctttttaagttgattaaattggtgaaaagttattgcttgtttgtctccatcctccactctaaaaaaatcaaatacagctcctggatttccttaccttttccatggctatttttatagtttcccccttgcttttattattcccttgtgtgttctcctgagtggttcttctattttttttttttttgcagctttttgggttgaaaatttagttcagtttttttctagttcaaataaggaaagcatttgaaaaagttttggtgatggccaggcgcagtggctcacacctgtaatcccagcactttgggaggccgaggtgagtggatcacctgaggtcaggaattcaagaccagcctggccaacatggtgaaaccccgtctctattaaaaatacaaaaattagctgggcatggtggcaggcgcttgtaaccccagctactctggaggctgaggcagaagaatcgcctgaacctgggaggtggagtttgcagtgatccgagattgtgccactgcacttcagcctgggtaacagagcgagactctgtctcaaaaaaaaaaaaaaaaaagagttttggtgatacctcacaccttgtgactgacacttttatcattcattataaatgcccctgtttatctttcatgatcgtttttgtgttaaagtcaattctgtcttagtattactacactggctttcaaatggttgctgttgacatgatatatatttttacatttttttactttcaacccattcatacttttgaatctaaaatgtgcctccatatataacatatagtcagatcttgttttttatccagtctcataatctctgccttttgactggagactttacattaaatattgatacagtgggtttaccattttacttttcattttctatgaatctcctgtcttttttccctctgtttctcctgctgtactactttcttttgcattaagcaaatatttcctagcataacattttaatgctttcaataattattttcagtatacatttttagttattttcttagtggttactctaagacttatcatatacttatcaaaatcaacttcagatttatacgaacttaatcccagtgaaatgtacaaatgttacttctggataggtctgttatcttctccctgtttgtgctaggatcatgtatttttgtacacatataacatctatatatgttacaaacccaataatatattgctatatatattacttaattttacacctactaaagaagttgagaaaagaaaggagaacaagtccctatgtgcagagtttatatgttatctgactcacaagttctggtcctcttcagctggtcctatggatttgagctactatctggtgtcatttccttactccatttaagttttattcccacctacctcctttctgcttttattgtccaatatgttagatttctatttgttaccccacaattatacaattatgtatataatcattttacacaatcgctttttaaatcagttaagaaagcaaataaaatatgcattgatactgtattttataattacctaattacctttacagtgctccttgctttttcctgtggattctgactactgtctgtagtcacttgccttcagcttgaagaacttcttttagtatttcctgtaaggtgggtctgctaacaacagatgatctgtttttgtttatctggcaatatccttatttgcctctgctttttgaaacacagtattgctagatgtaagattctgggttgacactcttgttctttctttgcacttgttctgccttgcagtttgaatacagtcatgtactgtcttctccatctggcacacctgaggtagagtcttccccttatgagtgcggtctgggtggaggaaagggccccagcatcttagccatagtcaccaagaacttagcttctgcaactgagagttggcagaaatgagagggcttggtggcctgcacctcctggtggatgccagcttccttcgctgggagctgagaaggaaagaagcgctgccttcctggccacacctgcctggagtggagcttccctcaaggggagggagcagactgtgccttcagtgctacagatattccctgctcttactgagagtcagattttcttgaagaatgtttctccatttgtcgtatgcccttagaagaatttccagggagtttaagtggttgtttttagatcatcttcaccaggatagtggtttccctggggaattgtccgcagggctcctcaagctggccttccagaaatgcactcctgcctcatgccttttgagcaggttgtgttcatgtttttattactcttaaatatcatatagttgtagttttggtcttctctctaacccagtaagtaaaaagagatttaaaaacaattgccaagttgtttttttgtctaaaatttaaaattccgttcttatatttctaattgtattatgtcatgatcagagactatggcctgtatgtgagtttgccagggctgctgtcaccaagcactgcaaaccgagtggcataaaccactgcaaggcagcgccgcgcagctctggaggctacgagtctggatggaaggtgttagcagggccatgctccgtctaaaaggttctagggaagactaattctttgcctcctcctagcttgtagaagcatcatcccgatctgtgctttcatcttgacacggcatttccctgaagatgtggtgtctgtgcccaaatctcccatttttataagaacactggtcattttggatcagggcccaccccagtgacctcatcttaactaattttacctgtactgacttcatccccaaataaggccacattgtgaggtactgggggttaggatggtgacctatgaatttctagtgagtggttgggggaggcacagtccaacacataacagcttgtaaaaattttgttttctaaaatggagaattttcgtggtctgatatatgatacctttttgcaaatatttcttaaatagcctaagagagtgttgttatttttattactattattattattactagtaaatagacttgattttagagcagttttaggttgatagcaaaattgagcagaaagtacagagtccctatacaccacctgcccccacacagacacagccctccactactaatatccagcaccagaggagtatgtttgttacaaacaatgacctacattgacacctcattatcccccgaagtccgtagtttaggggtcactcttgggttgtacattccatgggttttgacaactgtgtaatcccttgcatctaccattagagtgtaacacagagtagtttcactgctgtgctataccttttatctcttcctctgtctaatccctggcaaccagtgatctttttcttgtctccatcgttatgccttttccagaatgtcatgtaattgcaatcatatgcgggcttttcatttggcttctttcacttagtgatatgtatttgaggttcttccatggcttcttgtgacttaatagctcatttcttgttagcactgaataatttcccttgtctgattcacatcagttacttatccatccactttctgaaggacgtcttggtaacttccaagttttggcaattctgagtaaagctgccgtaaacattcgtgtgcaggttttggtgtggacgtaagttttcaactccttcgggtaaatatcaaggagcacagttgctggatcatatggtaacagtgcatttggtttttaaactgactgctaaactgtcttcccgactggctgtgccattttgcgttcccgcagcaatgactgagagttcctgttgctccacatccatcccagcatctggcatcatcagtgttgtggatttttgttgtttagtagctgtgcagtggtatctcattgctgttttagtcttttattctctaatgacaaatgacattgcgcactgtttcaggtgcttacttgccatctgtctgtcttctttggtgatgtgtctatttctgtcttttgcccagtttttagtggttgtttgttttcttattgttgagttttgagagttctttgtatattttggacacctgttctttgtcagatatatcttttgcaaacgttttctccccaaaacagtgatttaatggggagtggtggaatggagttagtatcaaaatcactggtagagctttaactgtatatagagggaggatacaagggtcttattccaaacctgccaaactggaaccttcatgggcgtgcctgggcatgtgaattttacaagcctggaggcaggggagtggtggaagatggagggactggataggtgcaggagctctggactgagcgagtcatgggatggaaaagggaggtgtcaagaatgactcttgggttcttggattgaaccaaatggctgccaggagaagttgtttactgaaatggagaaccctggaggaagagcaggtctaggtgaacgattaagagttcagtttcaaatatgttgaatttgagaagccagaagacatccaagtgcagatgccaagcaggcagaggagtgaccaatggatctgaatcccagaggagtttggctggagaggccgatttggttggggggtgacatacctgaagatggcccttggaagcctgtgagatcagctgagcacgcaatgtaagctgaggagagaagagggcctggtacagagccagaggtgctgggtattttaaggttaggtgagaaaggagatggaaaaagagccgtcagagaagtaagagtcgaattaggagggtgcagagtcagaagccaaaacaagataatggcttaagtggggagctacgctgagtctgggaggaggcagcgtcagggagcccactctgaagtctcgttgagatggagacctgagggacagagaggacttagccaggttggggacagggtttgtgcagggcgtggctcggagtaggggctgggggcgtgggacggggcaggaatcacggcattccctgggaggaacagcaggtggcaaggcctctgtggctggctcacctgagggcgggtgttttggagtctatgatgcttaggatgccacatcctcggggacctgatcaggcatccttgggtctctgttcgagcccctgcaagagctgaaggtttggtgccctcaccttggggtctgcctgatggtgaaaagccatgtggggagtgggttgatttgcttgggctaccatgtcaaagctccgcagactggggcttcagaaacagatggttatcatctctcagttctggaggctggaagtccaagatcagggtgtcagcagcgtcagcttctcctgcagcctctctcctgggcttgcagacggctctccaccctctatgtcctcgcatggtcattgcccaaatctcctcttcttagaaggacaccagtcagattggattagggtccatctcaatgacctcattttgccttaatcacctatgtaaaggccacatctccaaacacagtcccattcagaggtacaggggatgagggtttcagcatttgaattttaggggacacagttcagcccctaatagggagcgaggctccatgagccccaggcaccatggggatcaagcatgtggggagcattttgagggcctcagacccccagtgaacctgtgcagtcctggaggtgggctcctgcctccccagcaccagggggaccactctgattcccccctccctcccgcccacaggctccctggtcggccagagactctcagaccatcctgatgtgaggaaaatcgggttcacaggctccacagaggtgggcaagcacatcatgaaaaggtgcgtggctgggggtggagcagaggaggggctgctgtgggctgcgcctgggacatggcagtgctgtcccaggagctgtgtcctgcttcccaggctccagggcacagccacttccgtggccctgctgggctctatgcaaacgctgaagaggcatctgcctttctggcaaagccccggggaggcctgggcggagacctgtggagccctgtcagaccagcaaggggctggatcgagaggtgctgagagtataaaacacgcatggatttcaagaactgagcacccacaaaaaagtgaaatagctcattaataggatgtttggggtttttttttgttttgttgttgtttttttttttgagacagggtcttgatctgtcactcatggtggagtgcagtggcaccatcatagctcactgtagccttgacttcctgggctcaagtgatgctcctcagcctcccaagtagctgggactacaggcatgcaccaccaagcccagctaattttttgtgtttttcatagagatggggtctcatggtgttgcccagactggtctcaaactcctgggctcaagcaatccacctgactcggcctcccatctccgtgctgggatgactgacgtgagccactgtgctctgccttcattaagtttttatattgatttcaagttgaaatgataatattcttgattagttgggttaaataaaatataataaaatatactattaggattaatttcacctgcttcttttcaggttttttttttttttcaatggagtctcacagtgtcacccaggctggagtgcagtgtcgtgatcatggctgcagcctctgcctccctggctcatgcgatcctcctaccttagcctcctgagtagctgggactacagacacgtgccaccatacctggataagtttttaaattttttgtagagatggggttttgctatgttgcccagcctggtctcgaactcctttaatgtggctaccatcaaaaaaagtcccattgtctatgtggctactgtttgaagctttcattctatttctatggacagaagtgatctaggtcaactcatgtcttcatccttggactttggcctcaaattgactggtgtcatctcccagactctgtcactaaaccacaatatgacctgggccacacccatgccttgggtcccccaccagttccattacagcagtttgatagtgcaggggttctggtctccatcactgacaagctgggagagccagccagggccagaccacaggtggagccctgactgacactggagcctgccccagccctgacactgaacttctgggggtgggttttggcacctgcactttgagtgacgtgggtaggggaatggggtaactgcaagtagtcactgcaggtttgcctctcctaattcaaaagctagctggtctcttcctctgaggtgtgtaggttgtagccatgtctgagcacatgtgagtcaagtccagggtgagggctcaggaaatgtcagctctgagcactccagagctggacagagggtttggggggcaagatatgttgatctgcctcaccatggtaaccattttaccatcaatatgtagttcatgctataaccaggcatgtggtggcacgtgcctgtagtcccagctactcgggaggctgaggtggaagaagcctgggacacggaagctaaatgagccgagatcacgcactgcactccagcctgggcaacaaagaaagcctggctcaaataaataaataaataaatagaacagaacaaaaaaaaaagtacctcaatttgaacattttatttaaaaaaataaatactaggctgggcatggtggctcacacctggaatcccagcactttggggagactgaggccagctggtcacttgaggccaggagtttgagaccaccctggccaacatggtgaaaccccatctctacaaaaaatacaaaaaaaaaaaaaaatagccaggtgtggtggtatatgcctatattcccagctactctagaggctgaggcaggagaatcgcttgaatccggaaggcggaggttacagtaagctgagatcacaccactgtactccagcctgggcaacagagtgtgactctatctcaaaggaaaaaaaaaaaggctgggtgctgtggctcatgcctgtaatcccagcattttgggaggccgaggtgggcagatcacctgaggtcaggagttcaagaccagcctgaccaacatggtgaaaccccgtccctactgaaaatacaaaaattagccgggcgtggtggcacgtgcctgtaatcccagctactcgggaggctgaggtagaagaatcgcttgaacccgggaggtggaggttgcatgagccaagatcatgccattgcaccccagccggggtgacaagagtgagactccatctaaaaacaaaacaaaacaaaacaaaacaaacaaacaaaactaaaaaacgaaatcatgctatgaacctcaaatatacacagtaaaatttattaaaaaaaaaaaaaaaagaagagcaaagcagagctctgagcagcttcctgccccagcatccctggttctgctgctttcttcttcccaggcagccgtgtcacacagacctgcagctgagatgggtgccatctccctgggttgcttctgcagaggaggcctctcctccccagtggagcctcctacctgccggctattgactgagtgtccagctgaggacagcatccctgcagtgcatttcttgcccactgatgtgatgtgttcatgactcccagcctctctgtttgctctgccactaatacaaggaggtgccccagcctctgggcccctgcagctgtgccagcggatggtgctgttttgtattccttaatttgtgcagcaccagctgcgtgcaggcactgtgcttggcaccggggctgtaataggacccagacagatgcgtgcctgccctggccaggctcatgctctgcaggtggggtcagaggtcaacatgcagtagaggaaaggacagcagatggggtgcacaggcaggctgtggttttatacggggcgatcagggaggcaccccagagaagggaacacaggcctgcaggaaatgaggtgtggagtgggcagcaggaagggcagtccagggggcagtggggcacaggcctggtgtgtacaggccagaaaggaaaggcaggtggccgtgtgaagccgcaaggggtgggggggagtggggaggcactggccgggtcttgcttcttgcagcaaagcatgctttgggcctacccaggtccctgccacctggggtcccaatgcccctacctgccctggagggaccggccccaccagccctctgttccttgcagctgtgccataagtaacgtgaagaaggtgtccctggaactgggcgggaagtcacccctcatcatctttgctgactgtgacctcaacaaggctgtgcagatggtgagggccgggcctggagggggcagggacagtgagcgggaacagggactgtagggaccaggaggccctgtctctgattccacagccacactcacacgtgtagccctggtggagtccatagcgtcatcacaagcatagcgtggcaggcagcaggcttagggaagaatgacgtgtgccctccaaacatacttcccaagaagtttcatagctgccaggatagctgagatcaactgcctataacatatgtgtgtgtgtgtattacatataaatatgaaattgggaaacacacgccacagctccatctgttctgaaataaacattgcagccttttctgtctgatgagagggcaaatcagatgtgttgatctgcttcactatggtaaccattttaccatctatatgtaatccataacttcatgctgtaaacctcaaatatacacaataaaatgtgtgtttttaaaataaaagagcaaagcagaactctgagcacttgggcccagccctgctgacagtgaccctctaccggtggccgtgggtgcagtgcctggctccaccactgacttagtgggcagccttgagcaagttacctaacctctgtggcgtctgtgctcccacctgtggatagggaccatggtgatacccacctcccgggtggctgcagaatgaatatgtctgaagggcttaggttagtggcaagtgccacttgagacatgtgtcagtccttgttctcaccattagtattgttgttgccttggtcctgtcctgactcctgtgggagcaaaccagtaagaccatgttcagccaggtccccaaatatgcccccggccctatctaagttccactgtgccgtggagggtggcctaacaccctagcttgggtgtgaaagggagtccaacctcatttggtggagaaactgagggaggcaagggccttgttcacgggcccgggtgaacccatcagcacggggatctagctgggccctgtgctgagctggaggtcggggccctgtcattggctgtgcagtcccaggttccaggagagccaggcttgaccatggctctccgtcctcccctgggtctcccacagcaggcgagtttgaaaaagcaggctgcctggggcctctgagggcctttgttctggactcctgccaggagttccctgggccagggctgccccacctctcacccacccatgtcggggctgcctgcctgtgtcccaccctctgccctgtcacccaccgcctgctccatgcttacacacacggctggcatctctcctgtcagctcccaagagtgtagactctgaaacaggagtcggcacctcctgggccgccccagtgagccacccagggtgcaggagggtctcaggcaggccaaggctcactcccacttggtccccatgctctgcagtgtggatggcagccttatcctccagtggtgggagttggggcgtggtgtctctctgtcactgcatgggcctcagcgtcttcacttcccacacagttacctctcacctctcctcttgaggtgactgaggattgagtggggcccacaggaggagatcaggacacatgggtgcctcctttcctaattagaagaggcggctgggccctggcagagccgggggctggtgtcccaggaggagcagtgacctggtgttcttgtccattctctgaaggggatgagttctgttttcttcaacaaaggagagaattgcattgcagcaggccgactctttgtggaggactccattcatgatgagttcgtgcggagagtggtaagtcctgccccagggtctgcgggcggctggttcactgggacagcagcgcctggctggagggggttggaggaggggagacagggcagggtcaagtgaggctgggctcctcctggaggacactccccccgggggtcagggaacccacagcgggagctgtgctgagtcttcactggattttattatttcaccaagaaatagcagacctgtagcaaaactgacatcaccaaaaagggcccatcttgggttggtcccctagaaatagagcctggggcaagaattcagtgcaggtgatttactcagagtggactcttgggtgaagcctggaaagagaagagaccaggggaggactggacagaatggagcaagagcctggtctcaggtcagcctgggcctgaccatggacaggggccctggagcacgaatccccctacacaggcatacccctggagccaagtggccaggctgtgggcccctgtggcaggtaggcttggctgtgggccgccagcaggggagagtagctcccgtcaggctctgcagccaccttgcatggcctcggggatctggtgggcacaggacagtgtctcccaccagatttatccactcagccacacctggaagagcaggcttgatgctggcctcgggacagatgggccatcctgagtccccttgggaggtttgtaatgcctggcttctcagttcctcagcgggttggcttcatcctctccaagcagctcggatatggtgggagtatggggctgatggcaccagcattaccttctcaccacatggtgccagagtgggacatgactccttcctcaccacctctgttagaaaacactgtggggttgacacgagccaggcctcagccatccttcatccaggccatgataccagggggggagcaagctgaggttggcttagcttccgcgaagagcaccgccccccaccgcccctaggttgtggagagcagcatctaatcccagtggatagtggcagggatgcgggagaaacagccagcaaccgccacacatggtttcagagagatggtacctgggaaaccagggaaaaagacggcctatgagcagaggggtgagggaggggcccctggaggagagctggtgctggacctggggaggtggctcagagtccggaagcagtgggaaaaggaaggactttctaggacgggctagaacagtttttgccatataacgaccctcaacacggagtggctggaaatgaagccctgccctcagctcatgtttctgtgggcagcagtggcagtctaggctggggtttgttggggctcatctgggtttgtcagagcttgcccaaacatctgcagtgagactcaggggcagcggggcagcgggtggcttcgtgggacagctgtcgttgccctgggggcctgcattctgcagcgtgtgctgggacatgttcacgtggacagtggaaagactcctaagagtgagagcacaagttgagaggcctcttgaaatgcacgaaacattgcttccatgcattgtgctgcctaagcaagtcacaggccggcccagattcaaggggtgaggaaacagactctaccacgtgatgggaggcacaagctcatcttccatagttggggagctggcctgcccggccaagtgaggcccactgccacgatgggcccggcacaggaatagcaggaccaggatacagacccagggactactggagataaagtggcggtcatggggggagtgtgactgcggggacacagagctgtgcacacaaggtcctgtctgggggtcttaagggagtcatgagacttccacagaagggtgactgcaagggccagagtcccagggataattctcaggacagtcacaatcccaaataaaggaagtgaggccagtgttcaggaggctcagtaggctgcttgttctttgtatccaagatacaaagccatttgatcggggtgcggtttggggcgacaggacaggagcagagaataaggaacaaaagcaaccgggtttggctacagggtggagacaggacagtcagaggcacacagtgggccctggtgagaagagcagaggggtgtgccgggtgctcgagtcacacctgtgtctgattagggctgattaggggtgcagagtttgcaagatgtgagatgccctggccttggaggaggagggtcagcagactagagccttgggcccctccccttcacttaatttctttcccactttggcaccaggactattgcagcagggctggtgtatcccacctaccgcacatcctggagtcccccggacaaacagttccttcagcttcttggtccatgaggctggtgcaggaccagagtcagatacgtgttgtattgagccccatctcaactagtcaaatatgccggcctctgtcctcctcacccacacccctgtatgtctccatttccagcccatatgttgctgggctcctgtctccttggagacttctgtccctctacacataggagccatttgggatttcagcctggaaggtggatttagagtcagaattcagaaagccctgaggctagaacagagtgtggactttccccaggggtcagccatgagagctgagtcaggtgaggatcattgtcagaaactgtggcagcacaagccacacctgacttggaggactttctgcaggtagaagaggtgcggaagatgaaggtgggcaacccgctggacagggacaccgaccacgggccgcagaatcaccatgcccaccttgtgaagctgatggagtactgccagcatggcgtgaaggaaggggccacactggtctgcggcgggaatcaggtccctcggccaggtgagtcagagtgtgtcaggtccgcttgggtcaattgaggcagcaggtcccatggcctctggttccctgtccagctgaactggagacatctgaaggccaggtacctacacagtcaggctgcagccccatctgggacctgggatggactgggctgtggctatttgggcaccagccagacccggggatgggacgagcattattcagtgctggtttattcagtattgaactggactctgacttgcccttactgtcaccgcagccttgacagtctctcccccatagatttcatgagactagattttattatttttcctctatttcactggctgttaacctctcagccgttgcttcacctgttctctcaatgcaggtgcatccctgcctatccttagcttggaacacctctcatgggggactttttgcccgcaggatctctcccctgcagcagctcagaccctaccagatacaggcctccaggctccaccccacccagagctcctgaccgcacagccagcggcactggacacttccacctggatgtcccccaggcccttcaaactcaaaggtcattgcaatgtcccagctatagttgagcccagacacacacacctgctgctccaggaccctctgtctgatcgagcagtccaggccagaagcgcagcagccacggggatggaccgttgacgctgctgctgggggacaggtgccatgactgtcttcctcacccctagctcctttgtgcctagaccgggccttgcacagagttggtgctcagttaatttgatggcatgaaggagggaaggaaagaaggaatccctgactcttctctttctgtgaccctcatttaaattattggcctgattctgtcaaatctgagaattgtcccactctgggcctcctctgcctccctgacccttgtgcgggctccctacatcttgcctcgctcagtgtcacagcagcctcccaagtggccttgtgagcctgctgatcctttattcacacagctgccagggtctggtgacctctcctctgttaagaccttgcagcagtgacccatcctcctgcagtgcaagttcggactccttgacctcacagccggagtccttcatgatctgtgcctgacttgcccttgacctgtactgcagctgcatttcattctctccagaggcttctcctgctttcttgggctccatgcatttgctgctgctcggcttagtggaggctttccagtgtccccacctggagagctcctgcttcttcagctcacaggacatccaagcccgggcatgcccgtgtcacagggcatcgggcaccgcacacctcaacagagctctcgtgaccattgcactgctgctgtcactgtccacttaccctcttcccactcccgctggactgtgagttccatgaggcaggtggggttgggggagcatcaccaggacccttgcagtgcaaggatggccgggttcaggattggtggaagacagtgtgatggaggccttgtaccaggagcagggctagggagccagcaaggggtagagcagcacccaggaaccaggaacagtggggagccatcaccccgccctggagggggtatgagaaggaacagaattcctgcagcccagtgaggggcagagcatgggatggggctgccttctggtggcccaatgaccaggagaccagctctcagggtctagaggggacaggggagagtacaaggtagatggggaggggatgacagaggggtggtcagcatggctcacatgccctggcagaagtggtgcaagactgtggagtaaacacaggccacataaaccactatgcatgtacatgagtcacattttcagaattgtaatcagtgttaaaacatcatttatgtatgtatgaaaaatattgaacattttattaaataactttttaacatggtttgaaattttctatttctctaaaaactagagtgagaaaattcccagtctcttgattattcctaagttaggcaggattgaatctcagtgaggtcaggcaggattgacctcagtgcagcaggtcttagggctctgtctctagagaaaacagagaggaagcatttcagttgtcagaagtgcttctgccctggcaaccagggcctgtaggggctgcatccagggttgggagtaggtggtcccttcttgactggagagcatggagctgggccttggtagggaccctgggagggcagagggaggaagccccaggaggtcccagtgcccagagctcctcccctctcacctcctcctactccacgggttgtagccaccagggtcagtggcagagctgcctgggaggtttcacctgccaaagaatctaggtggttttagattagctgtcaccagaaaagctcaagtctttgcttcggccatgggttctggcactaggattggatggacttgggatcaggtctcagctctgtcacctgccaaccggcggccccatttccctcaacagcactccgttaaaagcacggtgagacccacatcaaagaacaagccaggtgggagagccatctgcagcgtggtgacacccatcacacgggtgccgtgacccggtgcttatgtcgggtcatccgcaggtggctggtgtggcccaggccctgctgacggagaggctggaccatcgggcaccgtgtctcccatgtgcaacgggcttttatctctcttgcagggttcttctttgagccaactgttttcacagacgtggaagaccacatgttcatagccaaggaggagtccttcgggcctgtcatgatcatctctcggtttgctgatgggtagggaatcctgctgatgtctcaagggccctgactctctcccacgtgttactggggtcttcatgtgggctttgggaggtagtctacgggcagtcaggaggagaactcaggcagggcgcaagccgtggacaccccgcttgtgccgcctgctgagtctccacacccctgagaagagagcccagtgacctggggctttgagtcccccctgtgagcaaaggcagctcccttccctgtccttgtcacttgtcacatgctccagcatgtttctcacagcccgctgggctctgttctaaggtctgttaccatgcattaaaccaccccccacactgagtggcttggaataatcagagatttattttagtcacggtctaggttcaatgaggcaaacccatctctgctccatgcagtgtctggcctcagctggggtgacagagtggctatcctgatgctgctgggggtcttgcgggaggcttcctccgcgtggcagcctcggggttgccgaggcacctggttcccttcggaggccaggtggaagccaaaaggctctttataatctagctctttagaatcccagagcatcccttccaccacggcctgttgatgaagcaagtcacccagaccaggctgggctggaagggaaaaactgtactccactcacagtggggccactgaggcccatgctgtcacttctcaggcctgccccttgtctccgtagcaccttggagcaaattgcaaaatcgtgcctcgtcctcacattttactatccaactaccaaaaaaaccccagaaattatcatcgtatgtcagtggtattagaataagagacttcactgccacctagccaataaatatggttgtagtaagtctccaaatcgctgatgtctggtgaatgcccaacctgcggcgggcacatgtgggtccttctgcatgtgaggacccagcggcccctctctgggcccctgctcccagtctgtggaataaagggctcacccgatgatccaggagcccctgtggtggccacctgcccatgggcctctgcccttcctcctcgctcgcagcccaacccaacccaatcttgcccccggcgctgcagcccggcacattttctcctcggaaggtcttatgcagctggggtgtggagtgggccggggtgtggagtgggccaggctctcctctgcacctccctcagggagttcttcctggactttctctccagggacttggatgccgtgctgtctcgggccaatgccacggaatttggcctggcttctggtgtcttcaccagggacatcaacaaggccctgtatgtcagtgacaagctccaggcaggcactgtgtttgtcaacacgtacaacaagaccgacgtggccgctcccttcggaggattcaaacagtctggatttggcaaagatctaggtaacctactcctgcctgtggggttgctttcatttattcattcaacaaacatctgttcaaaaccacttagggccaggtcctatctcagatgcagggacgtagccttgaacatgatggctgtcagggttcgcttcttactgggagggaacttgtgacaagtccgtgagcaagatgcttgcagaggggggtcgtgctgggaagaaggcaagaagaggggcctggaggagacactccagccaggaggcactgggggcctctctggtgtggtggcacctgtgctacccagacctgcatagcagggaggagttggccatgaagacccaggggcccgtgtttctggctgagggttcagcaggtccttgggggaaccagctttggtcgtggagctgcagagaggccagagtggtgggagtgggccaagggggagcaggagggaggagagaaggcctgagaggcaggtaggggccagattgaaggcccatgggccatggtcaggggctcaggttgcatccttagtgtaaagaggagccatgggaccaaatgtacccccgggtgaacaccacgggtgttgcaagtctcccagtagaggtgaagttactcaggcggcagcaggcggggtccaccggcacatagcaggcggggtcccccggcacacagcacaggctccccagtgctctgcctgctgggtggcatggagttctgctccggccctctctccctgggctgctccaagccttgggcctcgtcctgctctctcagcaggggggactagacaggtctgatgggcaagcttggcaagggtggctggcaaggtccggggaagccatatgctgtctcagaggtcccacctgtctctccaggctcctgtgccagcccagagaccacagggaaggtcatgctgaggctgggggtcaaaggctggtcactgtttccagttttctctcctccccctgcccccatctttcaagccctgcagaagcccccaagggtacccatgagaggggcccatgtgtgcccacagggctggactcacatgcacgcatgtgtaggctggacactcctgcttcctctgtccctgtcggcctcctcttcctgccttctcccaggccaccttcctggtgtccaccaggggaatccatgaggcccatggccacccagggaaggctgtggctgccaagtccccaggacgtgatctgggccccttatgaatcctccccgagttccctcagctccctcctaaccctagtccccatgtcctgctgagaggaccagcaccctcctgggacaggcccacaagccaagccttccaagcagcctgcctgggcagactcaggacctcagagggacggggcagtgccactcctggggccagccagagctgctggggagctgtcaggcagccccaggcctcacacttgtcatggggctgagatgcaccagccacatagcactgccaaggcctggggcctcagggccctgcgaggcatccccttttcccagccacagcttgatgcagacgtagctgggggcagccatgagagaagagatgggccagtgagtctgggcagtaacgccaagtctctccacccccttccacctgaaggggcttcccactgtccagacaaggcggtgggagctggggaagattcttaaatggctgcctcagattggctttgtattctggggagtcctggcccactatccactgccagggataacctgggtaagattcatgacctcgctgggcctcgacttctcacctggaagtggggtgagccagagctgcccccacgtggttgctgaggaataagacacttgcagccccgagcagtgccctgcctgtggtgggagctgctgtgacctttgtggtgtcttacaggagaggcggctctgaacgagtacctgcgggtcaagacagtgaccttcgaatactgaagaaaggtctttgtgagaagaaagtccctgcccctccctcgtggctggggccccctccctcttgagcctgggtgcacagcacctcccacctggggggctagtggaagccctcctgcctgcacaccatgtctgcatcttggacgccctctgtccagtcagaagcagcccttggctgggtgaggtgtgcccctcccagggagaataaagcttctgaagagagaccgtccac

SEQ ID NO: 2 - RNA, 3137 nt, Homo sapiens
  source 1..3137: mol_type = other RNA
acagtaagtcttcttgacctaagcgggaaagagcgcaggcccctgcggggttggcttttacatggcatttatagacccgcccggagagggtgcgctgcgctcccgccatagtcccaccaccggtgagcgccgcccccactcggctgactctccgcccgccccgcgcccctcccctcacgggctctggccttaaccagagctcgcggactggcggggacaggtcccacctcctggctcccaggacgggtctgcaccaacctcagtttcggggctgcggctcacagaagtctaacctgcccgggacgcccgcaccaactcctgcgcgcggtccttccaaccctcctgctaccatgaagattgcagtgattggacagagcctgtttggccaggaagtttactgccacctgaggaaggagggccacgaagtggtgggtgtgttcactgttccagacaaggatggaaaggccgaccccctgggtctggaagctgagaaggatggagtgccggtattcaagtactcccggtggcgtgcaaaaggacaggctttgcctgatgtggtggcaaaataccaggctttgggggccgagctcaacgtcctgcccttctgcagccaattcatccccatggagataatcagtgccccccggcatggctccatcatctatcacccgtcactgctccctaggcaccgaggggcctcggccatcaactggaccctcattcacggagataagaaaggggggttttccatcttctgggcggatgatggtctggacaccggagacctgctgctgcagaaggagtgtgaggtgctcccggacgacaccgtgagcacgctgtacaaccgcttcctcttccctgaaggcatcaaagggatggtgcaggccgtgaggctgatcgctgagggcaaagcccccagactccctcagcctgaggaaggagccacctatgaggggattcagaagaaggagacagccaagatcaactgggaccagccggcagaggccattcacaactggatccgcgggaacgacaaggtgccgggagcctggacagaggcctgtgaacagaaactgacatttttcaactcaacgctgaacacttcaggcctggtgcccgagggagacgctttgcccatcccaggagcccatcggccaggggtggtcaccaaagcaggactcatcctctttgggaatgatgacaaaatgctgctggtgaagaatattcagctggaggatggcaaaatgatcctggcctcgaacttctttaagggggcagccagcagtgtccttgagctgacagaggcagagctggttactgcggaggctgtgcggagtgtttggcagcggatcctccccaaagtcctggaggttgaagactccactgatttcttcaagtcaggggccgcgtctgtggacgttgtgaggctggtggaggaagtgaaggagctgtgtgatggcctggagttagaaaatgaagatgtgtacatggcatccacctttggggacttcatccagctgttagtgaggaagctgcgaggggacgatgaggagggcgagtgcagcattgactacgtggaaatggcagtgaacaagcgcactgtccgcatgccccaccagctcttcattgggggggagttcgtggatgccgagggcgccaagacctctgagaccatcaatcccaccgatggaagtgtcatctgccaggtatccctggcccaagtcaccgacgtcgacaaggcagtggccgcagccaaggatgcctttgagaatggacggtgggggaagatcagtgcgcgggaccggggccggctgatgtacagggctccaccatccccatcaaccaggccagacccaaccgcaacctgaccttgaccaggaaggagcctgttggggtttgtggcatcatcatcccctggaactatcccctgatgatgctgtcctggaagacagctgcctgcctggctgccgggaacacagtggtgatcaagcctgctcaggtgaccccactcacagccttgaagtttgcagagctgacattaaaggccggcattcccaaaggtgtggttaacgtcctcccaggatctggctccctggtcggccagagactctcagaccatcctgatgtgaggaaaatcgggttcacaggctccacagaggtgggcaagcacatcatgaaaagctgtgccataagtaacgtgaagaaggtgtccctggaactgggcgggaagtcacccctcatcatctttgctgactgtgacctcaacaaggctgtgcagatggggatgagttctgttttcttcaacaaaggagagaattgcattgcagcaggccgactctttgtggaggactccattcatgatgagttcgtgcggagagtggtagaagaggtgcggaagatgaaggtgggcaacccgctggacagggacaccgaccacgggccgcagaatcaccatgcccaccttgtgaagctgatggagtactgccagcatggcgtgaaggaaggggccacactggtctgcggcgggaatcaggtccctcggccagggttcttctttgagccaactgttttcacagacgtggaagaccacatgttcatagccaaggaggagtccttcgggcctgtcatgatcatctctcggtttgctgatggggacttggatgccgtgctgtctcgggccaatgccacggaatttggcctggcttctggtgtcttcaccagggacatcaacaaggccctgtatgtcagtgacaagctccaggcaggcactgtgtttgtcaacacgtacaacaagaccgacgtggccgctcccttcggaggattcaaacagtctggatttggcaaagatctaggagaggcggctctgaacgagtacctgcgggtcaagacagtgaccttcgaatactgaagaaaggtctttgtgagaagaaagtccctgcccctccctcgtggctggggccccctccctcttgagcctgggtgcacagcacctcccacctggggggctagtggaagccctcctgcctgcacaccatgtctgcatcttggacgccctctgtccagtcagaagcagcccttggctgggtgaggtgtgcccctcccagggagaataaagcttctgaagagagaccgtccac

SEQ ID NO: 3 - RNA, 3179 nt, Homo sapiens
  source 1..3179: mol_type = other RNA
tctgcggcaccaggactgagtagaagggagagagtggagaaggggaattgcagagagaaaaccaggggctgtttttctctcggagaggcgggtaggcactgggcgggcagaagcgccgctatccacccggatgcgcagctgctaaggggccgcctctgcaagcggctgcaaattcccggagggcagcgtctcctttcgctctgctgtgtccgtagcacatggcaggtccttccaaccctcctgctaccatgaagattgcagtgattggacagagcctgtttggccaggaagtttactgccacctgaggaaggagggccacgaagtggtgggtgtgttcactgttccagacaaggatggaaaggccgaccccctgggtctggaagctgagaaggatggagtgccggtattcaagtactcccggtggcgtgcaaaaggacaggctttgcctgatgtggtggcaaaataccaggctttgggggccgagctcaacgtcctgcccttctgcagccaattcatccccatggagataatcagtgccccccggcatggctccatcatctatcacccgtcactgctccctaggcaccgaggggcctcggccatcaactggaccctcattcacggagataagaaaggggggttttccatcttctgggcggatgatggtctggacaccggagacctgctgctgcagaaggagtgtgaggtgctcccggacgacaccgtgagcacgctgtacaaccgcttcctcttccctgaaggcatcaaagggatggtgcaggccgtgaggctgatcgctgagggcaaagcccccagactccctcagcctgaggaaggagccacctatgaggggattcagaagaaggagacagccaagatcaactgggaccagccggcagaggccattcacaactggatccgcgggaacgacaaggtgccgggagcctggacagaggcctgtgaacagaaactgacatttttcaactcaacgctgaacacttcaggcctggtgcccgagggagacgctttgcccatcccaggagcccatcggccaggggtggtcaccaaagcaggactcatcctctttgggaatgatgacaaaatgctgctggtgaagaatattcagctggaggatggcaaaatgatcctggcctcgaacttctttaagggggcagccagcagtgtccttgagctgacagaggcagagctggttactgcggaggctgtgcggagtgtttggcagcggatcctccccaaagtcctggaggttgaagactccactgatttcttcaagtcaggggccgcgtctgtggacgttgtgaggctggtggaggaagtgaaggagctgtgtgatggcctggagttagaaaatgaagatgtgtacatggcatccacctttggggacttcatccagctgttagtgaggaagctgcgaggggacgatgaggagggcgagtgcagcattgactacgtggaaatggcagtgaacaagcgcactgtccgcatgccccaccagctcttcattgggggggagttcgtggatgccgagggcgccaagacctctgagaccatcaatcccaccgatggaagtgtcatctgccaggtatccctggcccaagtcaccgacgtcgacaaggcagtggccgcagccaaggatgcctttgagaatggacggtgggggaagatcagtgcgcgggaccggggccggctgatgtacaggttggcagatctcatggagcagcaccaggaggagctggccaccattgaggccctggatgcgggtgccgtctacacgctggccctgaagacccacgtgggcatgtccatccagaccttccgctactttgctggctggtgtgacaagatccagggctccaccatccccatcaaccaggccagacccaaccgcaacctgaccttgaccaggaaggagcctgttggggtttgtggcatcatcatcccctggaactatcccctgatgatgctgtcctggaagacagctgcctgcctggctgccgggaacacagtggtgatcaagcctgctcaggtgaccccactcacagccttgaagtttgcagagctgacattaaaggccggcattcccaaaggtgtggttaacgtcctcccaggatctggctccctggtcggccagagactctcagaccatcctgatgtgaggaaaatcgggttcacaggctccacagaggtgggcaagcacatcatgaaaagctgtgccataagtaacgtgaagaaggtgtccctggaactgggcgggaagtcacccctcatcatctttgctgactgtgacctcaacaaggctgtgcagatggggatgagttctgttttcttcaacaaaggagagaattgcattgcagcaggccgactctttgtggaggactccattcatgatgagttcgtgcggagagtggtagaagaggtgcggaagatgaaggtgggcaacccgctggacagggacaccgaccacgggccgcagaatcaccatgcccaccttgtgaagctgatggagtactgccagcatggcgtgaaggaaggggccacactggtctgcggcgggaatcaggtccctcggccagggttcttctttgagccaactgttttcacagacgtggaagaccacatgttcatagccaaggaggagtccttcgggcctgtcatgatcatctctcggtttgctgatggggacttggatgccgtgctgtctcgggccaatgccacggaatttggcctggcttctggtgtcttcaccagggacatcaacaaggccctgtatgtcagtgacaagctccaggcaggcactgtgtttgtcaacacgtacaacaagaccgacgtggccgctcccttcggaggattcaaacagtctggatttggcaaagatctaggagaggcggctctgaacgagtacctgcgggtcaagacagtgaccttcgaatactgaagaaaggtctttgtgagaagaaagtccctgcccctccctcgtggctggggccccctccctcttgagcctgggtgcacagcacctcccacctggggggctagtggaagccctcctgcctgcacaccatgtctgcatcttggacgccctctgtccagtcagaagcagcccttggctgggtgaggtgtgcccctcccagggagaataaagcttctgaagagagac

SEQ ID NO: 4 - RNA, 3064 nt, Homo sapiens
  source 1..3064: mol_type = other RNA
acaggtcccacctcctggctcccaggacgggtctgcaccaacctcagtttcggggctgcggctcacagaagtctaacctgcccgggacgcccgcaccaactcctgcgcgcggtccttccaaccctcctgctaccatgaagattgcagtgattggacagagcctgtttggccaggaagtttactgccacctgaggaaggagggccacgaagtggtgggtgtgttcactgttccagacaaggatggaaaggccgaccccctgggtctggaagctgagaaggatggagtgccggtattcaagtactcccggtggcgtgcaaaaggacaggctttgcctgatgtggtggcaaaataccaggctttgggggccgagctcaacgtcctgcccttctgcagccaattcatccccatggagataatcagtgccccccggcatggctccatcatctatcacccgtcactgctccctaggcaccgaggggcctcggccatcaactggaccctcattcacggagataagaaaggggggttttccatcttctgggcggatgatggtctggacaccggagacctgctgctgcagaaggagtgtgaggtgctcccggacgacaccgtgagcacgctgtacaaccgcttcctcttccctgaaggcatcaaagggatggtgcaggccgtgaggctgatcgctgagggcaaagcccccagactccctcagcctgaggaaggagccacctatgaggggattcagaagaaggagacagccaagatcaactgggaccagccggcagaggccattcacaactggatccgcgggaacgacaaggtgccgggagcctggacagaggcctgtgaacagaaactgacatttttcaactcaacgctgaacacttcaggcctggtgcccgagggagacgctttgcccatcccaggagcccatcggccaggggtggtcaccaaagcaggactcatcctctttgggaatgatgacaaaatgctgctggtgaagaatattcagctggaggatggcaaaatgatcctggcctcgaacttctttaagggggcagccagcagtgtccttgagctgacagaggcagagctggttactgcggaggctgtgcggagtgtttggcagcggatcctccccaaagtcctggaggttgaagactccactgatttcttcaagtcaggggccgcgtctgtggacgttgtgaggctggtggaggaagtgaaggagctgtgtgatggcctggagttagaaaatgaagatgtgtacatggcatccacctttggggacttcatccagctgttagtgaggaagctgcgaggggacgatgaggagggcgagtgcagcattgactacgtggaaatggcagtgaacaagcgcactgtccgcatgccccaccagctcttcattgggggggagttcgtggatgccgagggcgccaagacctctgagaccatcaatcccaccgatggaagtgtcatctgccaggtatccctggcccaagtcaccgacgtcgacaaggcagtggccgcagccaaggatgcctttgagaatggacggtgggggaagatcagtgcgcgggaccggggccggctgatgtacaggttggcagatctcatggagcagcaccaggaggagctggccaccattgaggccctggatgcgggtgccgtctacacgctggccctgaagacccacgtgggcatgtccatccagaccttccgctactttgctggctggtgtgacaagatccagggctccaccatccccatcaaccaggccagacccaaccgcaacctgaccttgaccaggaaggagcctgttggggtttgtggcatcatcatcccctggaactatcccctgatgatgctgtcctggaagacagctgcctgcctggctgccgggaacacagtggtgatcaagcctgctcaggtgaccccactcacagccttgaagtttgcagagctgacattaaaggccggcattcccaaaggtgtggttaacgtcctcccaggatctggctccctggtcggccagagactctcagaccatcctgatgtgaggaaaatcgggttcacaggctccacagaggtgggcaagcacatcatgaaaagctgtgccataagtaacgtgaagaaggtgtccctggaactgggcgggaagtcacccctcatcatctttgctgactgtgacctcaacaaggctgtgcagatggggatgagttctgttttcttcaacaaaggagagaattgcattgcagcaggccgactctttgtggaggactccattcatgatgagttcgtgcggagagtggtagaagaggtgcggaagatgaaggtgggcaacccgctggacagggacaccgaccacgggccgcagaatcaccatgcccaccttgtgaagctgatggagtactgccagcatggcgtgaaggaaggggccacactggtctgcggcgggaatcaggtccctcggccagggttcttctttgagccaactgttttcacagacgtggaagaccacatgttcatagccaaggaggagtccttcgggcctgtcatgatcatctctcggtttgctgatggggacttggatgccgtgctgtctcgggccaatgccacggaatttggcctggcttctggtgtcttcaccagggacatcaacaaggccctgtatgtcagtgacaagctccaggcaggcactgtgtttgtcaacacgtacaacaagaccgacgtggccgctcccttcggaggattcaaacagtctggatttggcaaagatctaggagaggcggctctgaacgagtacctgcgggtcaagacagtgaccttcgaatactgaagaaaggtctttgtgagaagaaagtccctgcccctccctcgtggctggggccccctccctcttgagcctgggtgcacagcacctcccacctggggggctagtggaagccctcctgcctgcacaccatgtctgcatcttggacgccctctgtccagtcagaagcagcccttggctgggtgaggtgtgcccctcccagggagaataaagcttctgaagagaga

SEQ ID NO: 5 - RNA, 3157 nt, Homo sapiens
  source 1..3157: mol_type = other RNA
actgcgctcaagtggacggtcgcgcgtgcagagggaggccggatagcagaccccacaacgtggctcctggggccccgctatcgagagctcaggccccgcgggcacttgcctaggagaggaaagaatcttcccaaagtgcagacagagacggaatttaatcaggagtcccagacttggagtttggaggcatgggctctggtgtcaggtccttccaaccctcctgctaccatgaagattgcagtgattggacagagcctgtttggccaggaagtttactgccacctgaggaaggagggccacgaagtggtgggtgtgttcactgttccagacaaggatggaaaggccgaccccctgggtctggaagctgagaaggatggagtgccggtattcaagtactcccggtggcgtgcaaaaggacaggctttgcctgatgtggtggcaaaataccaggctttgggggccgagctcaacgtcctgcccttctgcagccaattcatccccatggagataatcagtgccccccggcatggctccatcatctatcacccgtcactgctccctaggcaccgaggggcctcggccatcaactggaccctcattcacggagataagaaaggggggttttccatcttctgggcggatgatggtctggacaccggagacctgctgctgcagaaggagtgtgaggtgctcccggacgacaccgtgagcacgctgtacaaccgcttcctcttccctgaaggcatcaaagggatggtgcaggccgtgaggctgatcgctgagggcaaagcccccagactccctcagcctgaggaaggagccacctatgaggggattcagaagaaggagacagccaagatcaactgggaccagccggcagaggccattcacaactggatccgcgggaacgacaaggtgccgggagcctggacagaggcctgtgaacagaaactgacatttttcaactcaacgctgaacacttcaggcctggtgcccgagggagacgctttgcccatcccaggagcccatcggccaggggtggtcaccaaagcaggactcatcctctttgggaatgatgacaaaatgctgctggtgaagaatattcagctggaggatggcaaaatgatcctggcctcgaacttctttaagggggcagccagcagtgtccttgagctgacagaggcagagctggttactgcggaggctgtgcggagtgtttggcagcggatcctccccaaagtcctggaggttgaagactccactgatttcttcaagtcaggggccgcgtctgtggacgttgtgaggctggtggaggaagtgaaggagctgtgtgatggcctggagttagaaaatgaagatgtgtacatggcatccacctttggggacttcatccagctgttagtgaggaagctgcgaggggacgatgaggagggcgagtgcagcattgactacgtggaaatggcagtgaacaagcgcactgtccgcatgccccaccagctcttcattgggggggagttcgtggatgccgagggcgccaagacctctgagaccatcaatcccaccgatggaagtgtcatctgccaggtatccctggcccaagtcaccgacgtcgacaaggcagtggccgcagccaaggatgcctttgagaatggacggtgggggaagatcagtgcgcgggaccggggccggctgatgtacaggttggcagatctcatggagcagcaccaggaggagctggccaccattgaggccctggatgcgggtgccgtctacacgctggccctgaagacccacgtgggcatgtccatccagaccttccgctactttgctggctggtgtgacaagatccagggctccaccatccccatcaaccaggccagacccaaccgcaacctgaccttgaccaggaaggagcctgttggggtttgtggcatcatcatcccctggaactatcccctgatgatgctgtcctggaagacagctgcctgcctggctgccgggaacacagtggtgatcaagcctgctcaggtgaccccactcacagccttgaagtttgcagagctgacattaaaggccggcattcccaaaggtgtggttaacgtcctcccaggatctggctccctggtcggccagagactctcagaccatcctgatgtgaggaaaatcgggttcacaggctccacagaggtgggcaagcacatcatgaaaagctgtgccataagtaacgtgaagaaggtgtccctggaactgggcgggaagtcacccctcatcatctttgctgactgtgacctcaacaaggctgtgcagatggggatgagttctgttttcttcaacaaaggagagaattgcattgcagcaggccgactctttgtggaggactccattcatgatgagttcgtgcggagagtggtagaagaggtgcggaagatgaaggtgggcaacccgctggacagggacaccgaccacgggccgcagaatcaccatgcccaccttgtgaagctgatggagtactgccagcatggcgtgaaggaaggggccacactggtctgcggcgggaatcaggtccctcggccagggttcttctttgagccaactgttttcacagacgtggaagaccacatgttcatagccaaggaggagtccttcgggcctgtcatgatcatctctcggtttgctgatggggacttggatgccgtgctgtctcgggccaatgccacggaatttggcctggcttctggtgtcttcaccagggacatcaacaaggccctgtatgtcagtgacaagctccaggcaggcactgtgtttgtcaacacgtacaacaagaccgacgtggccgctcccttcggaggattcaaacagtctggatttggcaaagatctaggagaggcggctctgaacgagtacctgcgggtcaagacagtgaccttcgaatactgaagaaaggtctttgtgagaagaaagtccctgcccctccctcgtggctggggccccctccctcttgagcctgggtgcacagcacctcccacctggggggctagtggaagccctcctgcctgcacaccatgtctgcatcttggacgccctctgtccagtcagaagcagcccttggctgggtgaggtgtgcccctcccagggagaataaagcttctgaagagag

SEQ ID NO: 6 - RNA, 2758 nt, Homo sapiens
  source 1..2758: mol_type = other RNA
acaggtcccacctcctggctcccaggacgggtctgcaccaacctcagtttcggggctgcggctcacagaagtctaacctgcccgggacgcccgcaccaactcctgcgcgcggtccttccaaccctcctgctaccatgaagattgcagtgattggacagagcctgtttggccaggaagtttactgccacctgaggaaggagggccacgaagtggtgggtgtgttcactgttccagacaaggatggaaaggccgaccccctgggtctggaagctgagaaggatggagtgccggtattcaagtactcccggtggcgtgcaaaaggacaggctttgcctgatgtggtggcaaaataccaggctttgggggccgagctcaacgtcctgcccttctgcagccaattcatccccatggagataatcagtgccccccggcatggctccatcatctatcacccgtcactgctccctaggcaccgaggggcctcggccattcacaactggatccgcgggaacgacaaggtgccgggagcctggacagaggcctgtgaacagaaactgacatttttcaactcaacgctgaacacttcaggcctggtgcccgagggagacgctttgcccatcccaggagcccatcggccaggggtggtcaccaaagcaggactcatcctctttgggaatgatgacaaaatgctgctggtgaagaatattcagctggaggatggcaaaatgatcctggcctcgaacttctttaagggggcagccagcagtgtccttgagctgacagaggcagagctggttactgcggaggctgtgcggagtgtttggcagcggatcctccccaaagtcctggaggttgaagactccactgatttcttcaagtcaggggccgcgtctgtggacgttgtgaggctggtggaggaagtgaaggagctgtgtgatggcctggagttagaaaatgaagatgtgtacatggcatccacctttggggacttcatccagctgttagtgaggaagctgcgaggggacgatgaggagggcgagtgcagcattgactacgtggaaatggcagtgaacaagcgcactgtccgcatgccccaccagctcttcattgggggggagttcgtggatgccgagggcgccaagacctctgagaccatcaatcccaccgatggaagtgtcatctgccaggtatccctggcccaagtcaccgacgtcgacaaggcagtggccgcagccaaggatgcctttgagaatggacggtgggggaagatcagtgcgcgggaccggggccggctgatgtacaggttggcagatctcatggagcagcaccaggaggagctggccaccattgaggccctggatgcgggtgccgtctacacgctggccctgaagacccacgtgggcatgtccatccagaccttccgctactttgctggctggtgtgacaagatccagggctccaccatccccatcaaccaggccagacccaaccgcaacctgaccttgaccaggaaggagcctgttggggtttgtggcatcatcatcccctggaactatcccctgatgatgctgtcctggaagacagctgcctgcctggctgccgggaacacagtggtgatcaagcctgctcaggtgaccccactcacagccttgaagtttgcagagctgacattaaaggccggcattcccaaaggtgtggttaacgtcctcccaggatctggctccctggtcggccagagactctcagaccatcctgatgtgaggaaaatcgggttcacaggctccacagaggtgggcaagcacatcatgaaaagctgtgccataagtaacgtgaagaaggtgtccctggaactgggcgggaagtcacccctcatcatctttgctgactgtgacctcaacaaggctgtgcagatggggatgagttctgttttcttcaacaaaggagagaattgcattgcagcaggccgactctttgtggaggactccattcatgatgagttcgtgcggagagtggtagaagaggtgcggaagatgaaggtgggcaacccgctggacagggacaccgaccacgggccgcagaatcaccatgcccaccttgtgaagctgatggagtactgccagcatggcgtgaaggaaggggccacactggtctgcggcgggaatcaggtccctcggccagggttcttctttgagccaactgttttcacagacgtggaagaccacatgttcatagccaaggaggagtccttcgggcctgtcatgatcatctctcggtttgctgatggggacttggatgccgtgctgtctcgggccaatgccacggaatttggcctggcttctggtgtcttcaccagggacatcaacaaggccctgtatgtcagtgacaagctccaggcaggcactgtgtttgtcaacacgtacaacaagaccgacgtggccgctcccttcggaggattcaaacagtctggatttggcaaagatctaggagaggcggctctgaacgagtacctgcgggtcaagacagtgaccttcgaatactgaagaaaggtctttgtgagaagaaagtccctgcccctccctcgtggctggggccccctccctcttgagcctgggtgcacagcacctcccacctggggggctagtggaagccctcctgcctgcacaccatgtctgcatcttggacgccctctgtccagtcagaagcagcccttggctgggtgaggtgtgcccctcccagggagaataaagcttctgaagag

SEQ ID NO: 7 - RNA, 2797 nt, Homo sapiens
  source 1..2797: mol_type = other RNA
ctcctggctcccaggacgggtctgcaccaacctcagtttcggggctgcggctcacagaagtctaacctgcccgggacgcccgcaccaactcctgcgcgcggtccttccaaccctcctgctaccatgaagattgcagtgattggacagagcctgtttggccaggaagtttactgccacctgaggaaggagggccacgaagtggtgggtgtgttcactgttccagacaaggatggaaaggccgaccccctgggtctggaagctgagaaggatggagtgccggtattcaagtactcccggtggcgtgcaaaaggacaggctttgcctgatgtggtggcaaaataccaggctttgggggccgagctcaacgtcctgcccttctgcagccaattcatccccatggagataatcagtgccccccggcatggctccatcatctatcacccgtcactgctccctaggcaccgaggggcctcggccatcaactggaccctcattcacggagataagaaaggggggttttccatcttctgggcggatgatggtctggacaccggagacctgctgctgcagaaggagtgtgaggtgctcccggacgacaccgtgagcacgctgtacaaccgcttcctcttccctgaaggcatcaaagggatggtgcaggccgtgaggctgatcgctgagggcaaagcccccagactccctcagcctgaggaaggagccacctatgaggggattcagaagaaggagacagccaagatcaactgggaccagccggcagaggccattcacaactggatccgcgggaacgacaaggtgccgggagcctggacagaggcctgtgaacagaaactgacatttttcaactcaacgctgaacacttcaggcctggtgcccgagggagacgctttgcccatcccaggagcccatcggccaggggtggtcaccaaagcaggactcatcctctttgggaatgatgacaaaatgctgctggtgaagaatattcagctggaggatggcaaaatgatcctggcctcgaacttctttaagggggcagccagcagtgtccttgagctgacagaggcagagctggttactgcggaggctgtgcggagtgtttggcagcggatcctccccaaagtcctggaggttgaagactccactgatttcttcaagtcaggggccgcgtctgtggacgttgtgaggctggtggaggaagtgaaggagctgtgtgatggcctggagttagaaaatgaagatgtgtacatggcatccacctttggggacttcatccagctgttagtgaggaagctgcgaggggacgatgaggagggcgagtgcagcattgactacgtggaaatggcagtgaacaagcgcactgtccgcatgccccaccagctcttcattgggggggagttcgtggatgccgagggcgccaagacctctgagaccatcaatcccaccgatggaagtgtcatctgccaggtatccctggcccaagtcaccgacgtcgacaaggcagtggccgcagccaaggatgcctttgagaatggacggtgggggaagatcagtgcgcgggaccggggccggctgatgtacagggctccaccatccccatcaaccaggccagacccaaccgcaacctgaccttgaccaggaaggagcctgttggggtttgtggcatcatcatcccctggaactatcccctgatgatgctgtcctggaagacagctgcctgcctggctgccgggaacacagtggtgatcaagcctgctcaggtgaccccactcacagccttgaagtttgcagagctgacattaaaggccggcattcccaaaggtgtggttaacgtcctcccaggatctggctccctggtcggccagagactctcagaccatcctgatgtgaggaaaatcgggttcacaggctccacagaggtgggcaagcacatcatgaaaaggggatgagttctgttttcttcaacaaaggagagaattgcattgcagcaggccgactctttgtggaggactccattcatgatgagttcgtgcggagagtggtagaagaggtgcggaagatgaaggtgggcaacccgctggacagggacaccgaccacgggccgcagaatcaccatgcccaccttgtgaagctgatggagtactgccagcatggcgtgaaggaaggggccacactggtctgcggcgggaatcaggtccctcggccagggttcttctttgagccaactgttttcacagacgtggaagaccacatgttcatagccaaggaggagtccttcgggcctgtcatgatcatctctcggtttgctgatggggacttggatgccgtgctgtctcgggccaatgccacggaatttggcctggcttctggtgtcttcaccagggacatcaacaaggccctgtatgtcagtgacaagctccaggcaggcactgtgtttgtcaacacgtacaacaagaccgacgtggccgctcccttcggaggattcaaacagtctggatttggcaaagatctaggagaggcggctctgaacgagtacctgcgggtcaagacagtgaccttcgaatactgaagaaaggtctttgtgagaagaaagtccctgcccctccctcgtggctggggccccctccctcttgagcctgggtgcacagcacctcccacctggggggctagtggaagccctcctgcctgcacaccatgtctgcatcttggacgccctctgtccagtcagaagcagcccttggctgggtgaggtgtgcccctcccagggagaataaagcttctgaag

SEQ ID NO: 8 - RNA, 2761 nt, Homo sapiens
  source 1..2761: mol_type = other RNA
acaggtcccacctcctggctcccaggacgggtctgcaccaacctcagtttcggggctgcggctcacagaagtctaacctgcccgggacgcccgcaccaactcctgcgcgcggtccttccaaccctcctgctaccatgaagattgcagtgattggacagagcctgtttggccaggaagtttactgccacctgaggaaggagggccacgaagtggtgggtgtgttcactgttccagacaaggatggaaaggccgaccccctgggtctggaagctgagaaggatggagtgccggtattcaagtactcccggtggcgtgcaaaaggacaggctttgcctgatgtggtggcaaaataccaggctttgggggccgagctcaacgtcctgcccttctgcagccaattcatccccatggagataatcagtgccccccggcatggctccatcatctatcacccgtcactgctccctaggcaccgaggggcctcggccattcacaactggatccgcgggaacgacaaggtgccgggagcctggacagaggcctgtgaacagaaactgacatttttcaactcaacgctgaacacttcaggcctggtgcccgagggagacgctttgcccatcccaggagcccatcggccaggggtggtcaccaaagcaggactcatcctctttgggaatgatgacaaaatgctgctggtgaagaatattcagctggaggatggcaaaatgatcctggcctcgaacttctttaagggggcagccagcagtgtccttgagctgacagaggcagagctggttactgcggaggctgtgcggagtgtttggcagcggatcctccccaaagtcctggaggttgaagactccactgatttcttcaagtcaggggccgcgtctgtggacgttgtgaggctggtggaggaagtgaaggagctgtgtgatggcctggagttagaaaatgaagatgtgtacatggcatccacctttggggacttcatccagctgttagtgaggaagctgcgaggggacgatgaggagggcgagtgcagcattgactacgtggaaatggcagtgaacaagcgcactgtccgcatgccccaccagctcttcattgggggggagttcgtggatgccgagggcgccaagacctctgagaccatcaatcccaccgatggaagtgtcatctgccaggtatccctggcccaagtcaccgacgtcgacaaggcagtggccgcagccaaggatgcctttgagaatggacggtgggggaagatcagtgcgcgggaccggggccggctgatgtacaggttggcagatctcatggagcagcaccaggaggagctggccaccattgaggccctggatgcgggtgccgtctacacgctggccctgaagacccacgtgggcatgtccatccagaccttccgctactttgctggctggtgtgacaagatccagggctccaccatccccatcaaccaggccagacccaaccgcaacctgaccttgaccaggaaggagcctgttggggtttgtggcatcatcatcccctggaactatcccctgatgatgctgtcctggaagacagctgcctgcctggctgccgggaacacagtggtgatcaagcctgctcaggtgaccccactcacagccttgaagtttgcagagctgacattaaaggccggcattcccaaaggtgtggttaacgtcctcccaggatctggctccctggtcggccagagactctcagaccatcctgatgtgaggaaaatcgggttcacaggctccacagaggtgggcaagcacatcatgaaaagctgtgccataagtaacgtgaagaaggtgtccctggaactgggcgggaagtcacccctcatcatctttgctgactgtgacctcaacaaggctgtgcagatggggatgagttctgttttcttcaacaaaggagagaattgcattgcagcaggccgactctttgtggaggactccattcatgatgagttcgtgcggagagtggtagaagaggtgcggaagatgaaggtgggcaacccgctggacagggacaccgaccacgggccgcagaatcaccatgcccaccttgtgaagctgatggagtactgccagcatggcgtgaaggaaggggccacactggtctgcggcgggaatcaggtccctcggccagggttcttctttgagccaactgttttcacagacgtggaagaccacatgttcatagccaaggaggagtccttcgggcctgtcatgatcatctctcggtttgctgatggggacttggatgccgtgctgtctcgggccaatgccacggaatttggcctggcttctggtgtcttcaccagggacatcaacaaggccctgtatgtcagtgacaagctccaggcaggcactgtgtttgtcaacacgtacaacaagaccgacgtggccgctcccttcggaggattcaaacagtctggatttggcaaagatctaggagaggcggctctgaacgagtacctgcgggtcaagacagtgaccttcgaatactgaagaaaggtctttgtgagaagaaagtccctgcccctccctcgtggctggggccccctccctcttgagcctgggtgcacagcacctcccacctggggggctagtggaagccctcctgcctgcacaccatgtctgcatcttggacgccctctgtccagtcagaagcagcccttggctgggtgaggtgtgcccctcccagggagaataaagcttctgaagagaga

SEQ ID NO: 9 - RNA, 3178 nt, Homo sapiens
  source 1..3178: mol_type = other RNA
tctgcggcaccaggactgagtagaagggagagagtggagaaggggaattgcagagagaaaaccaggggctgtttttctctcggagaggcgggtaggcactgggcgggcagaagcgccgctatccacccggatgcgcagctgctaaggggccgcctctgcaagcggctgcaaattcccggagggcagcgtctcctttcgctctgctgtgtccgtagcacatggcaggtccttccaaccctcctgctaccatgaagattgcagtgattggacagagcctgtttggccaggaagtttactgccacctgaggaaggagggccacgaagtggtgggtgtgttcactgttccagacaaggatggaaaggccgaccccctgggtctggaagctgagaaggatggagtgccggtattcaagtactcccggtggcgtgcaaaaggacaggctttgcctgatgtggtggcaaaataccaggctttgggggccgagctcaacgtcctgcccttctgcagccaattcatccccatggagataatcagtgccccccggcatggctccatcatctatcacccgtcactgctccctaggcaccgaggggcctcggccatcaactggaccctcattcacggagataagaaaggggggttttccatcttctgggcggatgatggtctggacaccggagacctgctgctgcagaaggagtgtgaggtgctcccggacgacaccgtgagcacgctgtacaaccgcttcctcttccctgaaggcatcaaagggatggtgcaggccgtgaggctgatcgctgagggcaaagcccccagactccctcagcctgaggaaggagccacctatgaggggattcagaagaaggagacagccaagatcaactgggaccagccggcagaggccattcacaactggatccgcgggaacgacaaggtgccgggagcctggacagaggcctgtgaacagaaactgacatttttcaactcaacgctgaacacttcaggcctggtgcccgagggagacgctttgcccatcccaggagcccatcggccaggggtggtcaccaaagcaggactcatcctctttgggaatgatgacaaaatgctgctggtgaagaatattcagctggaggatggcaaaatgatcctggcctcgaacttctttaagggggcagccagcagtgtccttgagctgacagaggcagagctggttactgcggaggctgtgcggagtgtttggcagcggatcctccccaaagtcctggaggttgaagactccactgatttcttcaagtcaggggccgcgtctgtggacgttgtgaggctggtggaggaagtgaaggagctgtgtgatggcctggagttagaaaatgaagatgtgtacatggcatccacctttggggacttcatccagctgttagtgaggaagctgcgaggggacgatgaggagggcgagtgcagcattgactacgtggaaatggcagtgaacaagcgcactgtccgcatgccccaccagctcttcattgggggggagttcgtggatgccgagggcgccaagacctctgagaccatcaatcccaccgatggaagtgtcatctgccaggtatccctggcccaagtcaccgacgtcgacaaggcagtggccgcagccaaggatgcctttgagaatggacggtgggggaagatcagtgcgcgggaccggggccggctgatgtacaggttggcagatctcatggagcagcaccaggaggagctggccaccattgaggccctggatgcgggtgccgtctacacgctggccctgaagacccacgtgggcatgtccatccagaccttccgctactttgctggctggtgtgacaagatccagggctccaccatccccatcaaccaggccagacccaaccgcaacctgaccttgaccaggaaggagcctgttggggtttgtggcatcatcatcccctggaactatcccctgatgatgctgtcctggaagacagctgcctgcctggctgccgggaacacagtggtgatcaagcctgctcaggtgaccccactcacagccttgaagtttgcagagctgacattaaaggccggcattcccaaaggtgtggttaacgtcctcccaggatctggctccctggtcggccagagactctcagaccatcctgatgtgaggaaaatcgggttcacaggctccacagaggtgggcaagcacatcatgaaaagctgtgccataagtaacgtgaagaaggtgtccctggaactgggcgggaagtcacccctcatcatctttgctgactgtgacctcaacaaggctgtgcagatggggatgagttctgttttcttcaacaaaggagagaattgcattgcagcaggccgactctttgtggaggactccattcatgatgagttcgtgcggagagtggtagaagaggtgcggaagatgaaggtgggcaacccgctggacagggacaccgaccacgggccgcagaatcaccatgcccaccttgtgaagctgatggagtactgccagcatggcgtgaaggaaggggccacactggtctgcggcgggaatcaggtccctcggccagggttcttctttgagccaactgttttcacagacgtggaagaccacatgttcatagccaaggaggagtccttcgggcctgtcatgatcatctctcggtttgctgatggggacttggatgccgtgctgtctcgggccaatgccacggaatttggcctggcttctggtgtcttcaccagggacatcaacaaggccctgtatgtcagtgacaagctccaggcaggcactgtgtttgtcaacacgtacaacaagaccgacgtggccgctcccttcggaggattcaaacagtctggatttggcaaagatctaggagaggcggctctgaacgagtacctgcgggtcaagacagtgaccttcgaatactgaagaaaggtctttgtgagaagaaagtccctgcccctccctcgtggctggggccccctccctcttgagcctgggtgcacagcacctcccacctggggggctagtggaagccctcctgcctgcacaccatgtctgcatcttggacgccctctgtccagtcagaagcagcccttggctgggtgaggtgtgcccctcccagggagaataaagcttctgaagagaga

SEQ ID NO: 10 - RNA, 3097 nt, Homo sapiens
  source 1..3097: mol_type = other RNA
aggtcccacctcctggctcccaggacgggtctgcaccaacctcagtttcggggctgcggctcacagaagtctaacctgcccgggacgcccgcaccaactcctgcgcgcggtccttccaaccctcctgctaccatgaagattgcagtgattggacagagcctgtttggccaggaagtttactgccacctgaggaaggagggccacgaagtggtgggtgtgttcactgttccagacaaggatggaaaggccgaccccctgggtctggaagctgagaaggatggagtgccggtattcaagtactcccggtggcgtgcaaaaggacaggctttgcctgatgtggtggcaaaataccaggctttgggggccgagctcaacgtcctgcccttctgcagccaattcatccccatggagataatcagtgccccccggcatggctccatcatctatcacccgtcactgctccctaggcaccgaggggcctcggccatcaactggaccctcattcacggagataagaaaggggggttttccatcttctgggcggatgatggtctggacaccggagacctgctgctgcagaaggagtgtgaggtgctcccggacgacaccgtgagcacgctgtacaaccgcttcctcttccctgaaggcatcaaagggatggtgcaggccgtgaggctgatcgctgagggcaaagcccccagactccctcagcctgaggaaggagccacctatgaggggattcagaagaaggagacagccaagatcaactgggaccagccggcagaggccattcacaactggatccgcgggaacgacaaggtgccgggagcctggacagaggcctgtgaacagaaactgacatttttcaactcaacgctgaacacttcaggcctggtgcccgagggagacgctttgcccatcccaggagcccatcggccaggggtggtcaccaaagcaggactcatcctctttgggaatgatgacagaatgctgctggtgaagaatattcagctggaggatggcaaaatgatcctggcctcgaacttctttaagggggcagccagcagtgtccttgagctgacagaggcagagctggttactgcggaggctgtgcggagtgtttggcagcggatcctccccaaagtcctggaggttgaagactccactgatttcttcaagtcaggggccgcgtctgtggacgttgtgaggctggtggaggaagtgaaggagctgtgtgatggcctggagttagaaaatgaagatgtgtacatggcatccacctttggggacttcatccagctgttagtgaggaagctgcgaggggacgatgaggagggcgagtgcagcattgactacgtggaaatggcagtgaacaagcgcactgtccgcatgccccaccagctcttcattgggggggagttcgtggatgccgagggcgccaagacctctgagaccatcaatcccaccgatggaagtgtcatctgccaggtatccctggcccaagtcaccgacgtcgacaaggcagtggccgcagccaaggatgcctttgagaatggacggtgggggaagatcagtgcgcgggaccggggccggctgatgtacaggttggcagatctcatggagcagcaccaggaggagctggccaccattgaggccctggatgcgggtgccgtctacacgctggccctgaagacccacgtgggcatgtccatccagaccttccgctactttgctggctggtgtgacaagatccagggctccaccatccccatcaaccaggccagacccaaccgcaacctgaccttgaccaggaaggagcctgttggggtttgtggcatcatcatcccctggaactatcccctgatgatgctgtcctggaagacagctgcctgcctggctgccgggaacacagtggtgatcaagcctgctcaggtgaccccactcacagccttgaagtttgcagagctgacattaaaggccggcattcccaaaggtgtggttaacgtcctcccaggatctggctccctggtcggccagagactctcagaccatcctgatgtgaggaaaatcgggttcacaggctccacagaggtgggcaagcacatcatgaaaagctgtgccataagtaacgtgaagaaggtgtccctggaactgggcgggaagtcacccctcatcatctttgctgactgtgacctcaacaaggctgtgcagatggggatgagttctgttttcttcaacaaaggagagaattgcattgcagcaggccgactctttgtggaggactccattcatgatgagttcgtgcggagagtggtagaagaggtgcggaagatgaaggtgggcaacccgctggacagggacaccgaccacgggccgcagaatcaccatgcccaccttgtgaagctgatggagtactgccagcatggcgtgaaggaaggggccacactggtctgcggcgggaatcaggtccctcggccagggttcttctttgagccaactgttttcacagacgtggaagaccacatgttcatagccaaggaggagtccttcgggcctgtcatgatcatctctcggtttgctgatggggacttggatgccgtgctgtctcgggccaatgccacggaatttggcctggcttctggtgtcttcaccagggacatcaacaaggccctgtatgtcagtgacaagctccaggcaggcactgtgtttgtcaacacgtacaacaagaccgacgtggccgctcccttcggaggattcaaacagtctggatttggcaaagatctaggagaggcggctctgaacgagtacctgcgggtcaagacagtgaccttcgaatactgaagaaaggtctttgtgagaagaaagtccctgcccctccctcgtggctggggccccctccctcttgagcctgggtgcacagcacctcccacctggggggctagtggaagccctcctgcctgcacaccatgtctgcatcttggacgccctctgtccagtcagaagcagcccttggctgggtgaggtgtgcccctcccagggagaataaagcttctgaagagagaccgtccacaaaaaaaaaaaaaaaaaaaaaaaaaaa

SEQ ID NO: 11 - RNA, 3195 nt, Homo sapiens
  source 1..3195: mol_type = other RNA
tctgcggcaccaggactgagtagaagggagagagtggagaaggggaattgcagagagaaaaccaggggctgtttttctctcggagaggcgggtaggcactgggcgggcagaagcgccgctatccacccggatgcgcagctgctaaggggccgcctctgcaagcggctgcaaattcccggagggcagcgtctcctttcgctctgctgtgtccgtagcacatggcaggtccttccaaccctcctgctaccatgaagattgcagtgattggacagagcctgtttggccaggaagtttactgccacctgaggaaggagggccacgaagtggtgggtgtgttcactgttccagacaaggatggaaaggccgaccccctgggtctggaagctgagaaggatggagtgccggtattcaagtactcccggtggcgtgcaaaaggacaggctttgcctgatgtggtggcaaaataccaggctttgggggccgagctcaacgtcctgcccttctgcagccaattcatccccatggagataatcagtgccccccggcatggctccatcatctatcacccgtcactgctccctaggcaccgaggggcctcggccatcaactggaccctcattcacggagataagaaaggggggttttccatcttctgggcggatgatggtctggacaccggagacctgctgctgcagaaggagtgtgaggtgctcccggacgacaccgtgagcacgctgtacaaccgcttcctcttccctgagggcatcaaagggatggtgcaggccgtgaggctgatcgctgagggcaaagcccccagactccctcagcctgaggaaggagccacctatgaggggattcagaagaaggagacagccaagatcaactgggaccagccggcagaggccattcacaactggatccgcgggaacgacaaggtgccgggagcctggacagaggcctgtgaacagaaactgacatttttcaactcaacgctgaacacttcaggcctggtgcccgagggagacgctttgcccatcccaggagcccatcggccaggggtggtcaccaaagcaggactcatcctctttgggaatgatgacaaaatgctgctggtgaagaatattcagctggaggatggcaaaatgatcctggcctcgaacttctttaagggggcagccagcagtgtccttgagctgacagaggcagagctggttactgcggaggctgtgcggagtgtttggcagcggatcctccccaaagtcctggaggttgaagactccactgatttcttcaagtcaggggccgcgtctgtggacgttgtgaggctggtggaggaagtgaaggagctgtgtgatggcctggagttagaaaatgaagatgtgtacatggcatccacctttggggacttcatccagctgttagtgaggaagctgcgaggggacgatgaggagggcgagtgcagcattgactacgtggaaatggcagtgaacaagcgcactgtccgcatgccccaccagctcttcattgggggggagttcgtggacgccgagggcgccaagacctctgagaccatcaatcccaccgatggaagtgtcatctgccaggtatccctggcccaagtcaccgacgtcgacaaggcagtggccgcagccaaggatgcctttgagaatggacggtgggggaagatcagtgcgcgggaccggggccggctgatgtacaggttggcagatctcatggagcagcaccaggaggagctggccaccattgaggccctggatgcgggtgccgtctacacgctggccctgaagacccacgtgggcatgtccatccagaccttccgctactttgctggctggtgtgacaagatccagggctccaccatccccatcaaccaggccagacccaaccgcaacctgaccttgaccaggaaggagcctgttggggtttgtggcatcatcatcccctggaactatcccctgatgatgctgtcctggaagacagctgcctgcctggctgccgggaacacagtggtgatcaagcctgctcaggtgaccccactcacagccttgaagtttgcagagctgacattaaaggccggcattcccaaaggtgtggttaacgtcctcccaggatctggctccctggtcggccagagactctcagaccatcctgatgtgaggaaaatcgggttcacaggctccacagaggtgggcaagcacatcatgaaaagctgtgccataagtaacgtgaagaaggtgtccctggaactgggcgggaagtcacccctcatcatctttgctgactgtgacctcaacaaggctgtgcagatggggatgagttctgttttcttcaacaaaggagagaattgcattgcagcaggccgactctttgtggaggactccattcatgatgagttcgtgcggagagtggtagaagaggtgcggaagatgaaggtgggcaacccgctggacagggacaccgaccacgggccgcagaatcaccatgcccaccttgtgaagctgatggagtactgccagcatggcgtgaaggaaggggccacactggtctgcggcgggaatcaggtccctcggccagggttcttctttgagccaactgttttcacagacgtggaagaccacatgttcatagccaaggaggagtccttcgggcctgtcatgatcatctctcggtttgctgatggggacttggatgccgtgctgtctcgggccaatgccacggaatttggcctggcttctggtgtcttcaccagggacatcaacaaggccctgtatgtcagtgacaagctccaggcaggcactgtgtttgtcaacacgtacaacaagaccgacgtggccgctcccttcggaggattcaaacagtctggatttggcaaagatctaggagaggcggctctgaacgagtacctgcgggtcaagacagtgaccttcgaatactgaagaaaggtctttgtgagaagaaagtccctgcccctccctcgtggctggggccccctccctcttgagcctgggtgcacagcacctcccacctggggggctagtggaagccctcctgcctgcacaccatgtctgcatcttggacgccctctgtccagtcagaagcagcccttggctgggtgaggtgtgcccctcccagggagaataaagcttctgaagagagacgaaaaaaaaaaaaaaa

SEQ ID NO: 12 - RNA, 2849 nt, Homo sapiens
  source 1..2849: mol_type = other RNA
ctcctggctcccaggacgggtctgcaccaacctcagtttcggggctgcggctcacagaagtctaacctgcccgggacgcccgcaccaactcctgcgcgcggtccttccaaccctcctgctaccatgaagattgcagtgattggacagagcctgtttggccaggaagtttactgccacctgaggaaggagggccacgaagtggtgggtgtgttcactgttccagacaaggatggaaaggccgaccccctgggtctggaagctgagaaggatggagtgccggtattcaagtactcccggtggcgtgcaaaaggacaggctttgcctgatgtggtggcaaaataccaggctttgggggccgagctcaacgtcctgcccttctgcagccaattcatccccatggagataatcagtgccccccggcatggctccatcatctatcacccgtcactgctccctaggcaccgaggggcctcggccatcaactggaccctcattcacggagataagaaaggggggttttccatcttctgggcggatgatggtctggacaccggagacctgctgctgcagaaggagtgtgaggtgctcccggacgacaccgtgagcacgctgtacaaccgcttcctcttccctgaaggcatcaaagggatggtgcaggccgtgaggctgatcgctgagggcaaagcccccagactccctcagcctgaggaaggagccacctatgaggggattcagaagaaggagacagccaagatcaactgggaccagccggcagaggccattcacaactggatccgcgggaacgacaaggtgccgggagcctggacagaggcctgtgaacagaaactgacatttttcaactcaacgctgaacacttcaggcctggtgcccgagggagacgctttgcccatcccaggagcccatcggccaggggtggtcaccaaagcaggactcatcctctttgggaatgatgacaaaatgctgctggtgaagaatattcagctggaggatggcaaaatgatcctggcctcgaacttctttaagggggcagccagcagtgtccttgagctgacagaggcagagctggttactgcggaggctgtgcggagtgtttggcagcggatcctccccaaagtcctggaggttgaagactccactgatttcttcaagtcaggggccgcgtctgtggacgttgtgaggctggtggaggaagtgaaggagctgtgtgatggcctggagttagaaaatgaagatgtgtacatggcatccacctttggggacttcatccagctgttagtgaggaagctgcgaggggacgatgaggagggcgagtgcagcattgactacgtggaaatggcagtgaacaagcgcactgtccgcatgccccaccagctcttcattgggggggagttcgtggatgccgagggcgccaagacctctgagaccatcaatcccaccgatggaagtgtcatctgccaggtatccctggcccaagtcaccgacgtcgacaaggcagtggccgcagccaaggatgcctttgagaatggacggtgggggaagatcagtgcgcgggaccggggccggctgatgtacagggctccaccatccccatcaaccaggccagacccaaccgcaacctgaccttgaccaggaaggagcctgttggggtttgtggcatcatcatcccctggaactatcccctgatgatgctgtcctggaagacagctgcctgcctggctgccgggaacacagtggtgatcaagcctgctcaggtgaccccactcacagccttgaagtttgcagagctgacattaaaggccggcattcccaaaggtgtggttaacgtcctcccaggatctggctccctggtcggccagagactctcagaccatcctgatgtgaggaaaatcgggttcacaggctccacagaggtgggcaagcacatcatgaaaaggggatgagttctgttttcttcaacaaaggagagaattgcattgcagcaggccgactctttgtggaggactccattcatgatgagttcgtgcggagagtggtagaagaggtgcggaagatgaaggtgggcaacccgctggacagggacaccgaccacgggccgcagaatcaccatgcccaccttgtgaagctgatggagtactgccagcatggcgtgaaggaaggggccacactggtctgcggcgggaatcaggtccctcggccagggttcttctttgagccaactgttttcacagacgtggaagaccacatgttcatagccaaggaggagtccttcgggcctgtcatgatcatctctcggtttgctgatggggacttggatgccgtgctgtctcgggccaatgccacggaatttggcctggcttctggtgtcttcaccagggacatcaacaaggccctgtatgtcagtgacaagctccaggcaggcactgtgtttgtcaacacgtacaacaagaccgacgtggccgctcccttcggaggattcaaacagtctggatttggcaaagatctaggagaggcggctctgaacgagtacctgcgggtcaagacagtgaccttcgaatactgaagaaaggtctttgtgagaagaaagtccctgcccctccctcgtggctggggccccctccctcttgagcctgggtgcacagcacctcccacctggggggctagtggaagccctcctgcctgcacaccatgtctgcatcttggacgccctctgtccagtcagaagcagcccttggctgggtgaggtgtgcccctcccagggagaataaagcttctgaagagaaaaaaaaaaaaaaaaaaaaaaaaaaaaaaaaaaaaaaaaaaaaaaaaaa

SEQ ID NO: 13 - RNA, 3647 nt, Homo sapiens
  source 1..3647: mol_type = other RNA
taaaaaaaaaaaaaaagaagagcaaagcagagctctgagcagcttcctgccccagcatccctggttctgctgctttcttcttcccaggcagccgtgtcacacagacctgcagctgagatgggtgccatctccctgggttgcttctgcagaggaggcctctcctccccagtggagcctcctacctgccggctattgactgagtgtccagctgaggacagcatccctgcagtgcatttcttgcccactgatgtgatgtgttcatgactcccagcctctctgtttgctctgccactaatacaaggaggtgccccagcctctgggcccctgcagctgtgccagcggatggtgctgttttgtattccttaatttgtgcagcaccagctgcgtgcaggcactgtgcttggcaccggggctgtaataggacccagacagatgcgtgcctgccctggccaggctcatgctctgcaggtggggtcagaggtcaacatgcagtagaggaaaggacagcagatggggtgcacaggcaggctgtggttttatacggggcgatcagggaggcaccccagagaagggaacacaggcctgcaggaaatgaggtgtggagtgggcagcaggaagggcagtccagggggcagtggggcacaggcctggtgtgtacaggccagaaaggaaaggcaggtggccgtgtgaagccgcaaggggtgggggggagtggggaggcactggccgggtcttgcttcttgcagcaaagcatgctttgggcctacccaggtccctgccacctggggtcccaatgcccctacctgccctggagggaccggccccaccagccctctgttccttgcagctgtgccataagtaacgtgaagaaggtgtccctggaactgggcgggaagtcacccctcatcatctttgctgactgtgacctcaacaaggctgtgcagatggggatgagttctgttttcttcaacaaaggagagaattgcattgcagcaggccgactctttgtggaggactccattcatgatgagttcgtgcggagagtggtagaagaggtgcggaagatgaaggtgggcaacccgctggacagggacaccgaccacgggccgcagaatcaccatgcccaccttgtgaagctgatggagtactgccagcatggcgtgaaggaaggggccacactggtctgcggcgggaatcaggtccctcggccagggttcttctttgagccaactgttttcacagacgtggaagaccacatgttcatagccaaggaggagtccttcgggcctgtcatgatcatctctcggtttgctgatggggacttggatgccgtgctgtctcgggccaatgccacggaatttggcctggcttctggtgtcttcaccagggacatcaacaaggccctgtatgtcagtgacaagctccaggcaggcactgtgtttgtcaacacgtacaacaagaccgacgtggccgctcccttcggaggattcgaacagtctggatttggcaaagatctaggtaacctactcctgcctgtggggttgctttcatttattcattcaacaaacatctgttcaaaaccacttagggccaggtcctatctcagatgcagggacgtagccttgaacatgatggctgtcagggttcgcttcttactgggagggaacttgtgacaagtccgtgagcaagatgcttgcagaggggtgtcgtgctgggaagaaggcaagaagaggggcctggaggagacactcccgccaggaggcactgggggcctctctggtgtggtggcacctgtgctacccagacctgcatagcagggaggagttggccgtgaagacccaggggcccgtgtttctggctgagggttcagcaggtccttgggggaaccagctttggtcgtggagctgcagagaggccagagtggtgggagtgggccaagggggagcaggagggaggagagagggcctgagaggcaggtaggggccagattgaaggcccatgggccatggtcaggggctcaggttgcatccttagtgtaaagaggagccatgggaccaaatgtacccccgggtgaacaccacgggtgttgcaagtctcccagtagaggtgaagttactcaggcggcagcaggcggggtcccccggcacacagcacaggctccccagtgctctgcctgctgggtggcgtggagttctgctccggccctctctccctgggctgctccaagccttgggcctcgtcctgctctctcagcaggggggactagacaggtctgatgggcaagcttggcaggggtggctggcaaggtccggggaagccatatgctgtctcagaggtcccacctgtctctccgggctcctgtgccagcccggagaccacagggaaggtcatgctgaggctgggggtcaaaggctggtcactgtttccagttttctctcctccccctgcccccatctttcaagccctgcagaagcccccaagggtacccatgagaggggcccatgtgtgcccacagggctggactcacatgcacgcatgtgtaggctggacactcctgcttcctctgtccctgtcggcctcctcttcctgccttctcccaggccaccttcctggtgtccaccaggggaatccatggggcccatggccacccagggaaggctgtggctgccaagtccccaggacgtgatctgggccccttatgaatcctgcccgagttcccccagctccctcctaaccctagtccccatgtcctgctgagaggaccagcaccctcctgggacaggcccacaagccaagccttccaagcagcctgcctgggcagactcaggacctcagagggacggggcagtgccactcctggggccagccagagctgctggggagctgtcaggcagccccaggcctcacacttgtcatggggctgagatgcaccagccacatggcactgccaaggcctggggcctcagggccctgtgaggcatccccttttcccagccacagcttgatgcagacgtggctgggggcagccatgagagaagagatgggccagtgagtctgggcagtaacgccaagtctctccacccccttccacctgaaggggcttcccactgtccagacaaggcggtgggagctggggaagattcttaaatggctgcctcagattggctttgtattctggggagtcctggcccgctatccactgccagggataacctgggtaagattcatgacctcgctgggcctcgacttctcacctggaagtggggtgagccagagctgcccccacgtggttgctgaggaataagacacttgcagccccgagcagtgccctgcctgtggtgggagctgctgtgacctttgtggtgtcttacaggagaggcggctctgaacgagtacctgcgggtcaagacagtgaccttcgaatactgaagaaaggtctttgtgagaagaaagtccctgcccctccctcgtggctggggccccctccctcttgagcctgggtgcacagcacctcccacctggggggctagtggaagccctcctgcctgcacaccatgtctgcatcttggacgccctctgtccagtcaggagcagcccttggctgggtgaggtgtgcccctcccagggagaataaagcttctgaagag

SEQ ID NO: 14 - RNA, 3084 nt, Homo sapiens
  source 1..3084: mol_type = other RNA
ccagagctcgcggactggcggggacaggtcccacctcctggctcccaggacgggtctgcaccaacctcagtttcggggctgcggctcacagaagtctaacctgcccgggacgcccgcaccaactcctgcgcgcggtccttccaaccctcctgctaccatgaagattgcagtgattggacagagcctgtttggccaggaagtttactgccacctgaggaaggagggccacgaagtggtgggtgtgttcactgttccagacaaggatggaaaggccgaccccctgggtctggaagctgagaaggatggagtgccggtattcaagtactcccggtggcgtgcaaaaggacaggctttgcctgatgtggtggcaaaataccaggctttgggggccgagctcaacgtcctgcccttctgcagccaattcatccccatggagataatcagtgccccccggcatggctccatcatctatcacccgtcactgctccctaggcaccgaggggcctcggccatcaactggaccctcattcacggagataagaaaggggggttttccatcttctgggcggatgatggtctggacaccggagacctgctgctgcagaaggagtgtgaggtgctcccggacgacaccgtgagcacgctgtacaaccgcttcctcttccctgaaggcatcaaagggatggtgcaggccgtgaggctgatcgctgagggcaaagcccccagactccctcagcctgaggaaggagccacctatgaggggattcagaagaaggagacagccaagatcaactgggaccagccggcagaggccattcacaactggatccgcgggaacgacaaggtgccgggagcctggacagaggcctgtgaacagaaactgacatttttcaactcaacgctgaacacttcaggcctggtgcccgagggagacgctttgcccatcccaggagcccatcggccaggggtggtcaccaaagcaggactcatcctctttgggaatgatgacaaaatgctgctggtgaagaatattcagctggaggatggcaaaatgatcctggcctcgaacttctttaagggggcagccagcagtgtccttgagctgacagaggcagagctggttactgcggaggctgtgcggagtgtttggcagcggatcctccccaaagtcctggaggttgaagactccactgatttcttcaagtcaggggccgcgtctgtggacgttgtgaggctggtggaggaagtgaaggagctgtgtgatggcctggagttagaaaatgaagatgtgtacatggcatccacctttggggacttcatccagctgttagtgaggaagctgcgaggggacgatgaggagggcgagtgcagcattgactacgtggaaatggcagtgaacaagcgcactgtccgcatgccccaccagctcttcattgggggggagttcgtggatgccgagggcgccaagacctctgagaccatcaatcccaccgatggaagtgtcatctgccaggtatccctggcccaagtcaccgacgtcgacaaggcagtggccgcagccaaggatgcctttgagaatggacggtgggggaagatcagtgcgcgggaccggggccggctgatgtacaggttggcagatctcatggagcagcaccaggaggagctggccaccattgaggccctggatgcgggtgccgtctacacgctggccctgaagacccacgtgggcatgtccatccagaccttccgctactttgctggctggtgtgacaagatccagggctccaccatccccatcaaccaggccagacccaaccgcaacctgaccttgaccaggaaggagcctgttggggtttgtggcatcatcatcccctggaactatcccctgatgatgctgtcctggaagacagctgcctgcctggctgccgggaacacagtggtgatcaagcctgctcaggtgaccccactcacagccttgaagtttgcagagctgacattaaaggccggcattcccaaaggtgtggttaacgtcctcccaggatctggctccctggtcggccagagactctcagaccatcctgatgtgaggaaaatcgggttcacaggctccacagaggtgggcaagcacatcatgaaaagctgtgccataagtaacgtgaagaaggtgtccctggaactgggcgggaagtcacccctcatcatctttgctgactgtgacctcaacaaggctgtgcagatggggatgagttctgttttcttcaacaaaggagagaattgcattgcagcaggccgactctttgtggaggactccattcatgatgagttcgtgcggagagtggtagaagaggtgcggaagatgaaggtgggcaacccgctggacagggacaccgaccacgggccgcagaatcaccatgcccaccttgtgaagctgatggagtactgccagcatggcgtgaaggaaggggccacactggtctgcggcgggaatcaggtccctcggccagggttcttctttgagccaactgttttcacaggcgtggaagaccacatgttcatagccaaggaggagtccttcgggcctgtcatgatcatctctcggtttgctgatggggacttggatgccgtgctgtctcgggccaatgccacggaatttggcctggcttctggtgtcttcaccagggacatcaacaaggccctgtatgtcagtgacaagctccaggcaggcactgtgtttgtcaacacgtacaacaagaccgacgtggccgctcccttcggaggattcaaacagtctggatttggcaaagatctaggagaggcggctctgaacgagtacctgcgggtcaagacagtgaccttcgaatactgaagaaaggtctttgtgagaagaaagtccctgcccctccctcgtggctggggccccctccctcttgagcctgggtgcacagcacctcccacctggggggctagtggaagccctcctgcctgcacaccatgtctgcatcttggacgccctctgtccagtcagaagcagcccttggctgggtgaggtgtgcccctcccagggagaataaagcttctgaagag

SEQ ID NO: 15 - RNA, 3040 nt, Homo sapiens
  misc_feature 1511: note = n is a, c, g, or u
  misc_feature 2864: note = n is a, c, g, or u
  misc_feature 2949: note = n is a, c, g, or u
  source 1..3040: mol_type = other RNA
gacgggtctgcaccaacctcagtttcggggctgcggctcacagaagtctaacctgcccgggacgcccgcaccaactcctgccgcgcggtccttccaaccctcctgctaccatgaagattgcagtgattggacagagcctgtttggccaggaagtttactgccacctgaggaaggagggccacgaagtggtgggtgtgttcactgttccagacaaggatggaaaggccgaccccctgggtctggaagctgagaaggatggagtgccggtattcaagtactcccggtggcgtgcaaaagcgcaagctttgcctgatgtggtggcaaaataccaggctttgggggccgaactcaacgtcctgccctcctgcagccaattcatccccatggagataatcagtgccccccggcatggctccatcatctatcacccgtcactgctccctaggcaccgaggggcctcggccatcaactggaccctcattcacggagataagaaaggggggttttccatcttctgggcggatgatggtctggacaccggagacctgctgctgcagaaggagtgtgaggtgctcccggacgacaccgtgagcacgctgtacaaccgcttcctcttccctgaaggcatcaaaggggtggtgcaggccgtgaggctgatcgctgagggcaaagcccccagactccctcagcctaaggaaggagccacctatgaggggattcagaagaaggagacagccaagatcaactgggaccagccggcagaggccattcacaactggatccgcgggaacgacaaggtgccgggagcctggacagaggcctgtgaacagaaactgacatttttcaactcaacgctgaacacttcaggcctggtgcccgagggagacgctttgcccatcccaggagcccatcggccaggggtggtcaccaaagcaggactcatcctctttgggaatgatgacaaaatgctgctggtgaagaatattcagctggaggatggcaaaatgatcctggcctcgaacttctttaagggggcagccagcagtgtccttgagctgacagaggcagagctggttactgcggaggctgtgcggagtgtttggcagcggatcctccccaaagtactggaggttgaagactccactgatttcttcaagtcaggggccgcgtctgtggacgttgtgaggctggtggaggaagtgaaggagctgtgtgatggcctggagttagaaaatgaagatgtgtacatggcatccacctttggggacttcatccagctgttagtgaggaagctgcgaggggacgatgaggagggcgagtgcagcattgactacgtggaaatggcagtgaacaagcgcactgtccgcatgccccaccagctcttcattgggggggagttcgtggatgccgagggcgccaagacctctgagaccatcaatcccaccgatggaagtgtcatctgccaggtatccctggcccaagtcaccgacgtcgacaaggcagtggccgcngccaagggtgcctttgagaatggacggtgggggaagatcagtgcgcgggaccggggccggctgatgtacaggttggcagatctcatggagcagcaccaggaggagctggccaccattgaggccctggatgcgggtgccgtctacacgctggccctgaagacccacgtgggcatgtccatccagaccttccgatactttgctggctggtgtgacaagatccagggctccaccatccccatcaaccaggccagacccaaccgcaacctgaccttgaccaggaaggagcctgttggggtttgtggcatcatcatcccctggaactatcccctgatgatgctgtcctggaagacagctgcctgcctggctgccgggaacacagtggtgatcaagcctgctcaggtgaccccactcacagccttgaagtttgcagagctgacattaaaggccgggattcccaaaggtgtggtcaacgtcctcccaggatctggctccctggtcggccagagactctcagaccatcctgatgtgaggaaaatcgggttcacaggctccacagaggtgggcaagcacatcatgaaaagctgtgccataagtaacgtgaagaaggtgtccctggaactgggcggggagtcacccttcatcatctttgctgactgtgacctcaacaaggctgtgcagatggggatgagttctgttttcttcagcaaaggagagaattgcattgcagcaggccgactctttgtggaggactccattcatgatgagttcgtgcggagagtggtagaagaggtgcggaagatgaaggtgggcaacccgctggacagggacaccgaccacgggccgcagaatcaccatgcccaccttgtgaagctgatggagtactgccagcatggcgtgaaggaaggggccacactggtctgcggcgggaatcaggtccctcggccagggttcttctttgagccaactgttttcacagacgtggaagaccacatgttcatagccaaggaggagtccttcgggcctgtcatgatcatctctcggtttgctgatggggacttggatgccgtgctgtctcgggccaatgccacggaatttggcctggcttctggtgtcttcaccagggacatcaacaaggccctgtatgtcagtgacaagctccaggcaggcactgtgtttgtcaacacgtacaacaagaccgacgtggccgctcccttcggaggattcaaacagtctggatttggcaaagatctaggagaggcggctctgaacgagtacctgcgggtcaagacagtgaccttcgaatactgaagaaaggtctgtgtgagaagaaagtccctgcccctccctcgtggntggggccccctccctcttgagcctgggtgcacagcacctcccacctggggggctagtggaagccctcctgcctgcacaccatgtntgcatcttggacgccctctgtccagtcagaagcagcccttggctgggtgaggtgtgcccctcccagggagaataaagcttctgaagataaa

SEQ ID NO: 16 - RNA, 3043 nt, Homo sapiens
  source 1..3043: mol_type = other RNA
aggtcccacctcctggctcccaggacgggtctgcaccaacctcagtttcggggctgcggctcacagaagtctaacctgcccgggacgcccgcaccaactcctgcgcgcggtccttccaaccctcctgctaccatgaagattgcagtgattggacagagcctgtttggccaggaagtttactgccacctgaggaaggagggccacgaagtggtgggtgtgttcactgttccagacaaggatggaaaggccgaccccctgggtctggaagctgagaaggatggagtgccggtattcaagtactcccggtggcgtgcaaaaggacaggctttgcctgatgtggtggcaaaataccaggctttgggggccgagctcaacgtcctgcccttctgcagccaattcatccccatggagataatcagtgccccccggcatggctccatcatctatcacccgtcactgctccctaggcaccgaggggcctcggccatcaactggaccctcattcacggagataagaaaggggggttttccatcttctgggcggatgatggtctggacaccggagacctgctgctgcagaaggagtgtgaggtgctcccggacgacaccgtgagcacgctgtacaaccgcttcctcttccctgaaggcatcaaagggatggtgcaggccgtgaggctgatcgctgagggcaaagcccccagactccctcagcctgaggaaggagccacctatgaggggattcagaagaaggagacagccaagatcaactgggaccagccggcagaggccattcacaactggatccgcgggaacgacaaggtgccgggagcctggacagaggcctgtgaacagaaactgacatttttcaactcaacgctgaacacttcaggcctggtgcccgagggagacgctttgcccatcccaggagcccatcggccaggggtggtcaccaaagcaggactcatcctctttgggaatgatgacaaaatgctgctggtgaagaatattcagctggaggatggcaaaatgatcctggcctcgaacttctttaagggggcagccagcggtgtccttgagctgacagaggcagagctggttactgcggaggctgtgcggagtttttggcagcggatcctccccaaagtcctggaggttgaagactccactgatttcttcaagtcaggggccgcgtctgtggacgttgtgaggctggtggaggaagtgaaggagctgtgtgatggcctggagttagaaaatgaagatgtgtacatggcatccacctttggggacttcatccagctgttagtgaggaagcttcgaggggacgatgaggagggcgagtgcagcattgactacgtggaaatggcagtgaacaagcgcactgtccgcatgccccaccagctcttcattgggggggagttcgtggatgccgagggcgccaagacctctgagaccatcaatcccaccgatggaagtgtcatctgccaggtatccctggcccaagtcaccgacgtcgacaaggcagtggccgcagccaaggatgcctttgagaatggacggtgggggaagatcggtgcgcgggaccggggccggctgatgtacaggttggcagatctcatggagcagcaccaggaggagctggccaccattgaggccctggatgcgggtgccgtctacacgctggccctgaagacccacgtgggcatgtccatccagaccttccgctactttgctggctggtgtgacaagatccagggctccaccatccccatcaaccaggccagacccaaccgcaacctgaccttgaccaggaaggagcctgttggggtttgtggcatcatcatcccctggaactatcccctgatgatgctgtcctggaagacagctgcctgcctggctgccgggaacacagtggtgatcaagcctgctcaggtgaccccactcacagccttgaagtttgcagagctgacattaaaggccggcattcccaaaggtgtggttaacgtcctcccaggatctggctccctggtcggccagagactctcagaccatcctgatgtgaggaaaatcgggttcacaggctccacagaggtgggcaagcacatcatgaaaagctgtgccataagtaacgtgaagaaggtgtccctggaactgggcgggaagtcacccctcatcatctttgctgactgtgacctcaacaaggctgtgcagatggggatgagttctgttttcttcaacaaaggagagaattgcattgcagcaggccgactctttgtggaggactccattcatgatgagttcgtgcggagagtggtagaagaggtgcggaagatgaaggtgggcaacccgctggacagggacaccgaccacgggccgcagaatcaccatgcccaccttgtgaagctgatggagtactgccagcatggcgtgaaggaaggggccacactggtctgcggcgggaatcaggtccctcggccagggttcttctttgagccaactgttttcacagacgtggaagaccacatgttcatagccaaggaggagtccttcgggcctgtcatgatcatctctcggtttgctgatggggacttggatgccgtgctgtctcgggccaatgccacggaatttggcctggcttctggtgtcttcaccagggacgtcaacaaggccctgtatgtcagtgacaagctccaggcaggcactgtgtttgtcaacacgtacaacaagaccgacgtggccgctcccttcggaggattcaaacagtctggatttggcaaagatctaggagaggcggctctgaacgagtacctgcgggtcaagacagtgaccttcgaatactgaagaaaggtctttgtgagaagaaagtccctgcccctccctcgtggctggggccccctccctcttgagcctgggtgcacagcacctcccacctggggggctagtggaagccctcctgcctgcacaccatgtctgcatcttggacgccctctgtccagtcagaagcagcccttggctgggtgaggtgtgcccctcccagggagaa

SEQ ID NO: 17 - RNA, 1515 nt, Homo sapiens
  source 1..1515: mol_type = other RNA
atgaagattgcagtgattggacagagcctgtttggccaggaagtttactgccacctgaggaaggagggccacgaagtggtgggtgtgttcactgttccagacaaggatggaaaggccgaccccctgggtctggaagctgagaaggatggagtgccggtattcaagtactcccggtggcgtgcaaaaggacaggctttgcctgatgtggtggcaaaataccaggctttgggggccgagctcaacgtcctgcccttctgcagccaattcatccccatggagataatcagtgccccccggcatggctccatcatctatcacccgtcactgctccctaggcaccgaggggcctcggccatcaactggaccctcattcacggagataagaaaggggggttttccatcttctgggcggatgatggtctggacaccggagacctgctgctgcagaaggagtgtgaggtgctcccggacgacaccgtgagcacgctgtacaaccgcttcctcttccctgaaggcatcaaagggatggtgcaggccgtgaggctgatcgctgagggcaaagcccccagactccctcagcctgaggaaggagccacctatgaggggattcagaagaaggagacagccaagatcaactgggaccagccggcagaggccattcacaactggatccgcgggaacgacaaggtgccgggagcctggacagaggcctgtgaacagaaactgacatttttcaactcaacgctgaacacttcaggcctggtgcccgagggagacgctttgcccatcccaggagcccatcggccaggggtggtcaccaaagcaggactcatcctctttgggaatgatgacaaaatgctgctggtgaagaatattcagctggaggatggcaaaatgatcctggcctcgaacttctttaagggggcagccagcagtgtccttgagctgacagaggcagagctggttactgcggaggctgtgcggagtgtttggcagcggatcctccccaaagtcctggaggttgaagactccactgatttcttcaagtcaggggccgcgtctgtggacgttgtgaggctggtggaggaagtgaaggagctgtgtgatggcctggagttagaaaatgaagatgtgtacatggcatccacctttggggacttcatccagctgttagtgaggaagctgcgaggggacgatgaggagggcgagtgcagcattgactacgtggaaatggcagtgaacaagcgcactgtccgcatgccccaccagctcttcattgggggggagttcgtggatgccgagggcgccaagacctctgagaccatcaatcccaccgatggaagtgtcatctgccaggtatccctggcccaagtcaccgacgtcgacaaggcagtggccgcagccaaggatgcctttgagaatggacggtgggggaagatcagtgcgcgggaccggggccggctgatgtacagggctccaccatccccatcaaccaggccagacccaaccgcaacc

SEQ ID NO: 18 - RNA, 1666 nt, Homo sapiens
  source 1..1666: mol_type = other RNA
atgaagattgcagtgattggacagagcctgtttggccaggaagtttactgccacctgaggaaggagggccacgaagtggtgggtgtgttcactgttccagacaaggatggaaaggccgaccccctgggtctggaagctgagaaggatggagtgccggtattcaagtactcccggtggcgtgcaaaaggacaggctttgcctgatgtggtggcaaaataccaggctttgggggccgagctcaacgtcctgcccttctgcagccaattcatccccatggagataatcagtgccccccggcatggctccatcatctatcacccgtcactgctccctaggcaccgaggggcctcggccatcaactggaccctcattcacggagataagaaaggggggttttccatcttctgggcggatgatggtctggacaccggagacctgctgctgcagaaggagtgtgaggtgctcccggacgacaccgtgagcacgctgtacaaccgcttcctcttccctgaaggcatcaaagggatggtgcaggccgtgaggctgatcgctgagggcaaagcccccagactccctcagcctgaggaaggagccacctatgaggggattcagaagaaggagacagccaagatcaactgggaccagccggcagaggccattcacaactggatccgcgggaacgacaaggtgccgggagcctggacagaggcctgtgaacagaaactgacatttttcaactcaacgctgaacacttcaggcctggtgcccgagggagacgctttgcccatcccaggagcccatcggccaggggtggtcaccaaagcaggactcatcctctttgggaatgatgacaaaatgctgctggtgaagaatattcagctggaggatggcaaaatgatcctggcctcgaacttctttaagggggcagccagcagtgtccttgagctgacagaggcagagctggttactgcggaggctgtgcggagtgtttggcagcggatcctccccaaagtcctggaggttgaagactccactgatttcttcaagtcaggggccgcgtctgtggacgttgtgaggctggtggaggaagtgaaggagctgtgtgatggcctggagttagaaaatgaagatgtgtacatggcatccacctttggggacttcatccagctgttagtgaggaagctgcgaggggacgatgaggagggcgagtgcagcattgactacgtggaaatggcagtgaacaagcgcactgtccgcatgccccaccagctcttcattgggggggagttcgtggatgccgagggcgccaagacctctgagaccatcaatcccaccgatggaagtgtcatctgccaggtatccctggcccaagtcaccgacgtcgacaaggcagtggccgcagccaaggatgcctttgagaatggacggtgggggaagatcagtgcgcgggaccggggccggctgatgtacaggttggcagatctcatggagcagcaccaggaggagctggccaccattgaggccctggatgcgggtgccgtctacacgctggccctgaagacccacgtgggcatgtccatccagaccttccgctactttgctggctggtgtgacaagatccagggctccaccatccccatcaaccaggccagacccaaccgcaacc

SEQ ID NO: 19 - RNA, 2961 nt, Homo sapiens
  source 1..2961: mol_type = other RNA
agataatcagtgccccccggcatggctccatcatctatcacccgtcactgctccctaggcaccgaggggcctcggccatcaactggaccctcattcacggagataagaaaggggggttttccatcttctgggcggatgatggtctggacaccggagacctgctgctgcagaaggagtgtgaggtgctcccggacgacaccgtgagcacgctgtacaaccgcttcctcttccctgaaggcatcaaagggatggccgtgaggctgatcgctgagggcaaagcccccagactccctcagcctgaggaaggagccacctatgaggggattcagaagaaggagacagccaagatcaactgggaccagccggcagaggccattcacaactggatccgcgggaacgacaaggtgccgggagcctggacagaggcctgtgaacagaaactgacatttttcaactcaacgctgaacacttcaggcctggtgcccgagggagacgctttgcccatcccaggagcccatcggccaggggtggtcaccaaagcaggactcatcctctttgggaatgatgacaaaatggtaagggcacggctgtgggtcacttgcctgctcaaagccacccatgctcctgtccttggactcaggcctcacaggaagaccctaggctcctctggagaaaatggaaaaaaccagacccaggaaggaacactgaccctgatttgtccctgaccacccggctggtcctgagcacagggtgtccgaggcagtttacccacttctctgttctgggaaagctgggctccctacccttcctggctaggcacccatctccaggctgagtgccctgtgtgggtgtcaggcaacctagaatcagagagaagccctcccagggagcctgggttcagggcctctctttggtctatcagaaacacctctgggtgtggggtcattaagcctctgtgcctcagctcccatctctttgaacggcgatgccatggtaacttagcacgtgcagagccttgggagccatgccggccacctgctcttgttattagcagactacaactcacggtaccagcaaacactgatggagcaccttttataccagaacaatgtatatgcgttaaatttaatctgcctaacaacactatgagatatgtataaatattatatccttatagaggaaaaaaacagagatttaaataacttgtccaggatcatccaagctagcccgtggcagagctgggattcagactctgaaattctggctccaaagccgtgatgctggtcttggccatggtagcttcctgttcatatgcactctactactccttctcacatgagcagccgggggtagggagagggcaggcagggatcttcccacacactgacagggtccggacaaaccccatgggtgtggtacccccagccgtgttgctgtgtccggcctaccagagtgaggcgtggcagtatggggcctggcctttgctcgctcttggtgtccagtctgccatgctcccctgtcagaaggtctaggctgctgttgatgtctgcaatgtagtgttttgggtatccaagattgatatatgcagttgcaagagaatatctgtctgtggtcaggttccctagaagcagcatctaaggtaaaaattcttgtgcaagtgatttattgagggaatgttccagaaaatcatgcgaggcagtaagggcagaggaaagcaaagcaaaagtaaaggttcaggagaaatctagcctggggctgctcccagggtgggttttggagtattaactgcaccctccaattatacctgcctgtccccacctctgtcagcctttggtttcagtggcccctggggtggggtggaggacccaccaggcataatccctcggcctctttgtgtacaggagctcttatccatccacagcaagcaaggatgggacagtgcaggccgttatcatccagcccttgctgcagctggaggacagggcaccagccacaggggtctgagcagggcacccacagcatctgtccagagacctgcaaagacaggaatgcaaagaaggcaattaagtgtcttaagaggaagctggggttatcagctctctcacaagagctttgtccactgtccagaggtggtcagggtgggaggggagtgaggagagaccagctgagcacacacaccctgctccccacagatcaacccagaagaccctgggttgaagcatctctcagccacgccctgtggagtctggctgggctttagcttgcagaaagctccagaacatctttgaaaggcaatggggcgagggtcaggccgagaggcaagttccagttctggcagagcatgcatacagagtaccattcttacacagccactcttaacgcacagtgacatgcacccacccatgagcttatccataactctttttgtacatgtgttttttttcctggcccctaacaaaagcatttgttgaaaaactattgataaacaagcaggccccaaacaattcaaacatcttattaaatacagtaaatctgaggcagacactagagtagcccagagtcatgagctacaatgggggcagttcatgtctggcagccagaatccccttgaactgatggctggacgcaggctctacctgggaccagcttgaagtgctatcctgaagctgcagactgcagggccggccagaccctttttcagcctctcctcttcccacctctgtatcccacacaggcatctggtgatgttctccaggtgtttctgtggcagttctgggagctactgggtgattgcaagattagtttttttttctaagttgactttctatgtggtgcctgaatgacgttttctttttttgttcagtaggaatccttttttatagaagtaataaagtcattacacttaaaaaaaaaaaaaaaaaaaaaaaaaaaaaaaaaaaaaaaaaaaaaaaggggcggccg

SEQ ID NO: 20 - RNA, 1010 nt, Homo sapiens
  source 1..1010: mol_type = other RNA
acaggtcccacctcctggctcccaggacgggtctgcaccaacctcagtttcggggctgcggctcacagaagtctaacctgcccgggacgcccgcaccaactcctgcgcgcggtccttccaaccctcctgctaccatgaagattgcagtgattggacagagcctgtttggccaggaagtttactgccacctgaggaaggagggccacgaagtggtgggtgtgttcactgttccagacaaggatggaaaggccgaccccctgggaccctcattcacggagataagaaaggggggttttccatcttctgggcggatgatggtctggacaccggagacctgctgctgcagaaggagtgtgaggtgctcccggacgacaccgtgagcacgctgtacaaccgcttcctcttccctgaaggcatcaaagggatggtgcaggccgtgaggctgatcgctgagggcaaagcccccagactccctcagcctgaggaaggagccacctatgaggggattcagaagaaggagacagccaagatcaactgggaccagccggcagaggccattcacaactggatccgcgggaacgacaaggtgccgggagcctggacagaggcctgtgaacagaaactgacatttttcaactcaacgctgaacacttcaggcctggtgcccgagggagacgctttgcccatcccaggagcccatcggccaggggtggtcaccaaagcaggactcatcctctttgggaatgatgacaaaatggtaagggcacggctgtgggtcacttgcctgctcaaagccacccatgctcctgtccttggactcaggcctcacaggaagaccctaggctcctctggagaaaatggaaaaaaccagacccaggaaggaacactgaccctgatttgtccctgaccacccggctggtcctgagcacagggtgtccgaggcagtttacccacttctctgttctggggaagctgggctccctacccttcctggctaggcacccatctcc

SEQ ID NO: 21 - RNA, 789 nt, Homo sapiens
  source 1..789: mol_type = other RNA
tttgtgaatcgttgattgctcaattaaacttttttaaatttaatttggctgaagtttttcttttaacatggtgtcagaagcgggatccaaagtacagcttctagcgacccccaggagtactgagtgaacaagcaaggtccttccaaccctcctgctaccatgaagattgcagtgattggacagagcctgtttggccaggaagtttactgccacctgaggaaggagggccacgaagtggtgggtgtgttcactgttccagacaaggatggaaaggccgaccccctgggtctggaagctgagaaggatggagtgccggtattcaagtactcccggtggcgtgcaaaaggacaggctttgcctgatgtggtggcaaaataccaggctttgggggccgagctcaacgtcctgcccttctgcagccaattcatccccatggagataatcagtgccccccggcatggctccatcatctatcacccgtcactgctccctaggcaccgaggggcctcggccatcaactggaccctcattcacggagataagaaaggggggttttccatcttctgggcggatgatggtctggacaccggagacctgctgctgcagaaggagtgtgaggtgctcccggacgacaccgtgagcacgctgtacaaccgcttcctcttccctgaaggcatcaaagggatggtgcaggccgtgaggctgatcgctgagggcaaagcccccagactccctcagcctgaggaaggagccacctatgaggggattcagaagaaggagacagccaag

SEQ ID NO: 22 - RNA, 3277 nt, Homo sapiens
  source 1..3277: mol_type = other RNA
acagtaagtcttcttgacctaagcgggaaagagcgcaggcccctgcggggttggcttttacatggcatttatagacccgcccggagagggtgcgctgcgctcccgccatagtcccaccaccggtgagcgccgcccccactcggctgactctccgcccgccccgcgcccctcccctcacgggctctggccttaaccagagctcgcggactggcggggacaggtcccacctcctggctcccaggacgggtctgcaccaacctcagtttcggggctgcggctcacagaagtctaacctgcccgggacgcccgcaccaactcctgcgcgcggtccttccaaccctcctgctaccatgaagattgcagtgattggacagagcctgtttggccaggaagtttactgccacctgaggaaggagggccacgaagtggtgggtgtgttcactgttccagacaaggatggaaaggccgaccccctgggtctggaagctgagaaggatggagtgccggtattcaagtactcccggtggcgtgcaaaaggacaggctttgcctgatgtggtggcaaaataccaggctttgggggccgagctcaacgtcctgcccttctgcagccaattcatccccatggagataatcagtgccccccggcatggctccatcatctatcacccgtcactgctccctaggcaccgaggggcctcggccatcaactggaccctcattcacggagataagaaaggggggttttccatcttctgggcggatgatggtctggacaccggagacctgctgctgcagaaggagtgtgaggtgctcccggacgacaccgtgagcacgctgtacaaccgcttcctcttccctgaaggcatcaaagggatggtgcaggccgtgaggctgatcgctgagggcaaagcccccagactccctcagcctgaggaaggagccacctatgaggggattcagaagaaggagacagccaagatcaactgggaccagccggcagaggccattcacaactggatccgcgggaacgacaaggtgccgggagcctggacagaggcctgtgaacagaaactgacatttttcaactcaacgctgaacacttcaggcctggtgcccgagggagacgctttgcccatcccaggagcccatcggccaggggtggtcaccaaagcaggactcatcctctttgggaatgatgacaaaatgctgctggtgaagaatattcagctggaggatggcaaaatgatcctggcctcgaacttctttaagggggcagccagcagtgtccttgagctgacagaggcagagctggttactgcggaggctgtgcggagtgtttggcagcggatcctccccaaagtcctggaggttgaagactccactgatttcttcaagtcaggggccgcgtctgtggacgttgtgaggctggtggaggaagtgaaggagctgtgtgatggcctggagttagaaaatgaagatgtgtacatggcatccacctttggggacttcatccagctgttagtgaggaagctgcgaggggacgatgaggagggcgagtgcagcattgactacgtggaaatggcagtgaacaagcgcactgtccgcatgccccaccagctcttcattgggggggagttcgtggatgccgagggcgccaagacctctgagaccatcaatcccaccgatggaagtgtcatctgccaggtatccctggcccaagtcaccgacgtcgacaaggcagtggccgcagccaaggatgcctttgagaatggacggtgggggaagatcagtgcgcgggaccggggccggctgatgtacaggttggcagatctcatggagcagcaccaggaggagctggccaccattgaggccctggatgcgggtgccgtctacacgctggccctgaagacccacgtgggcatgtccatccagaccttccgctactttgctggctggtgtgacaagatccagggctccaccatccccatcaaccaggccagacccaaccgcaacctgaccttgaccaggaaggagcctgttggggtttgtggcatcatcatcccctggaactatcccctgatgatgctgtcctggaagacagctgcctgcctggctgccgggaacacagtggtgatcaagcctgctcaggtgaccccactcacagccttgaagtttgcagagctgacattaaaggccggcattcccaaaggtgtggttaacgtcctcccaggatctggctccctggtcggccagagactctcagaccatcctgatgtgaggaaaatcgggttcacaggctccacagaggtgggcaagcacatcatgaaaagctgtgccataagtaacgtgaagaaggtgtccctggaactgggcgggaagtcacccctcatcatctttgctgactgtgacctcaacaaggctgtgcagatggggatgagttctgttttcttcaacaaaggagagaattgcattgcagcaggccgactctttgtggaggactccattcatgatgagttcgtgcggagagtggtagaagaggtgcggaagatgaaggtgggcaacccgctggacagggacaccgaccacgggccgcagaatcaccatgcccaccttgtgaagctgatggagtactgccagcatggcgtgaaggaaggggccacactggtctgcggcgggaatcaggtccctcggccagggttcttctttgagccaactgttttcacagacgtggaagaccacatgttcatagccaaggaggagtccttcgggcctgtcatgatcatctctcggtttgctgatggggacttggatgccgtgctgtctcgggccaatgccacggaatttggcctggcttctggtgtcttcaccagggacatcaacaaggccctgtatgtcagtgacaagctccaggcaggcactgtgtttgtcaacacgtacaacaagaccgacgtggccgctcccttcggaggattcaaacagtctggatttggcaaagatctaggagaggcggctctgaacgagtacctgcgggtcaagacagtgaccttcgaatactgaagaaaggtctttgtgagaagaaagtccctgcccctccctcgtggctggggccccctccctcttgagcctgggtgcacagcacctcccacctggggggctagtggaagccctcctgcctgcacaccatgtctgcatcttggacgccctctgtccagtcagaagcagcccttggctgggtgaggtgtgcccctcccagggagaataaagcttctgaagag

SEQ ID NO: 23 - RNA, 2797 nt, Homo sapiens; identical to SEQ ID NO: 7
  source 1..2797: mol_type = other RNA

SEQ ID NO: 24 - RNA, 2192 nt, Homo sapiens
  source 1..2192: mol_type = other RNA
gcggctcacagaagtctaacctgcccgggacgcccgcaccaactcctgcgcgcggtccttccaaccctcctgctaccatgaagattgcagtgattggacagagcctgtttggccaggaagtttactgccacctgaggaaggagggccacgaagtggtgggtgtgttcactgttccagacaaggatggaaaggccgaccccctggacaccaggacagagtgacagaggaggagaccggagaggagagccagtccagtcagggcccaaacatcacaccagaggctctaacagagaactgaatacaaagaagtgttccttgggtattgaagagtggaaggcagagagcccaaagttattggggacagcgactgcaggaagcagctgccactgtctggaagctgagaaggatggagtgccggtattcaagtactcccggtggcgtgcaaaaggacaggctttgcctgatgtggtggcaaaataccaggctttgggggccgagctcaacgtcctgcccttctgcagccaattcatccccatggagataatcagtgccccccggcatggctccatcatctatcacccgtcactgctccctaggcaccgaggggcctcggccatcaactggaccctcattcacggagataagaaaggggggttttccatcttctgggcggatgatggtctggacaccggagacctgctgctgcagaaggagtgtgaggtgctcccggacgacaccgtgagcacgctgtacaaccgcttcctcttccctgaaggcatcaaagggatggtgcaggccgtgaggctgatcgctgagggcaaagcccccagactccctcagcctgaggaaggagccacctatgaggggattcagaagaaggagacagccaagatcaactgggaccagccggcagaggccattcacaactggatccgcgggaacgacaaggtgccgggagcctggacagaggcctgtgaacagaaactgacatttttcaactcaacgctgaacacttcaggcctggtgcccgagggagacgctttgcccatcccaggagcccatcggccaggggtggtcaccaaagcaggactcatcctctttgggaatgatgacaaaatgctgctggtgaagaatattcagctggaggatggcaaaatgatcctggcctcgaacttctttaagggggcagccagcagtgtccttgagctgacagaggcagagctggttactgcggaggctgtgcggagtgtttggcagcggatcctccccaaagtcctggaggttgaagactccactgatttcttcaagtcaggggccgcgtctgtggacgttgtgaggctggtggaggaagtgaaggagctgtgtgatggcctggagttagaaaatgaagatgtgtacatggcatccacctttggggacttcatccagctgttagtgaggaagctgcgaggggacgatgaggagggcgagtgcagcattgactacgtggaaatggcagtgaacaagcgcactgtccgcatgccccaccagctcttcattgggggggagttcgtggatgccgagggcgccaagacctctgagaccatcaatcccaccgatggaagtgtcatctgccaggtatccctggcccaagtcaccgacgtcgacaaggcagtggccgcagccaaggatgcctttgagaatggacggtgggggaagatcagtgcgcgggaccggggccggctgatgtacaggtgggagcccaacatgtacctgccagccactgccaccatcagcttctgggcagtggcacgggggggacttctgtggaggcccttttacctgccaggaggagctgggtcctggggaggctatgggaccgaggccatcagatgggccaggctggggctccttgcctgaggctcagaaaaggcttctcagaggaagggatatgagaaacaggagacatttcagcagagtgggctcaggggaggtgcctggtggaggtgaggaggtgcggaagccaagggatgcttccaaagtgggcgcaggctgggcctcccaggcagacaaagcacttccctcaccagcctgggctggaggggacttagctcctgcacgcagaagacagcaagggccagagaagggctggcctggtctctgcttgctcagccaggctctgactactggaatctataggtttcacattttct

SEQ ID NO: 25 - RNA, 615 nt, Homo sapiens
  source 1..615: mol_type = other RNA
atatctgatatgtgataccatatgggagcaggctctgaaagaacactacaagtagagaggtccttccaaccctcctgctaccatgaagattgcagtgattggacagagcctgtttggccaggaagtttactgccacctgaggaaggagggccacgaagtggtgggtgtgttcactgttccagacaaggatggaaaggccgaccccctgggtctggaagctgagaaggatggagtgccggtattcaagtactcccggtggcgtgcaaaaggacaggctttgcctgatgtggtggcaaaataccaggctttgggggccgagctcaacgtcctgcccttctgcagccaattcatccccatggagataatcagtgccccccggcatggctccatcatctatcacccgtcactgctccctaggcaccgaggggcctcggccatcaactggaccctcattcacggagataagaaaggggggttttccatcttctgggcggatgatggtctggacaccggagacctgctgctgcagaaggagtgtgaggtgctcccggacgacaccgtgagcacgctgtacaaccgcttcctcttccctgaaggcatcaaagggatggtgca

SEQ ID NO: 26 - RNA, 1020 nt, Homo sapiens
  source 1..1020: mol_type = other RNA
acagtaagtcttcttgacctaagcgggaaagagcgcaggcccctgcggggttggcttttacatggcatttatagacccgcccggagagggtgcgctgcgctcccgccatagtcccaccaccggtgagcgccgcccccactcggctgactctccgcccgccccgcgcccctcccctcacgggctctggccttaaccagagctcgcggactggcggggacaggtcccacctcctggctcccaggacgggtctgcaccaacctcagtttcggggctgcggctcacagaagtctaacctgcccgggacgcccgcaccaactcctgcgcgcggtgagtttctgggctctcgagagcgctggactcccggcggaaaggaggctgccccggctgcagctccgggggctccgggggctccaggggctccaggactcggttctcaccgcaagggctcctgcggggcccatcaacttcgccgctgggacgccgggctcggggtccttccaaccctcctgctaccatgaagattgcagtgattggacagagcctgtttggccaggaagtttactgccacctgaggaaggagggccacgaagtggtgggtgtgttcactgttccagacaaggatggaaaggccgaccccctgggtctggaagctgagaaggatggagtgccggtattcaagtactcccggtggcgtgcaaaaggacaggctttgcctgatgtggtggcaaaataccaggctttgggggccgagctcaacgtcctgcccttctgcagccaattcatccccatggagataatcagtgccccccggcatggctccatcatctatcacccgtcactgctccctaggcaccgaggggcctcggccatcaactggaccctcattcacggagataagaaaggggggttttccatcttctgggcggatgatggtctggacaccggagacctgctgctgcagaaggagtgtgaggtgctcccggacgacaccgtgagcacgctgtacaaccgcttcctctt

SEQ ID NO: 27 - RNA, 689 nt, Homo sapiens
  source 1..689: mol_type = other RNA
ctttcgctctgctgtgtccgtagcacatggcaggtacttggcccatcaagagtgagagagggtgagcgagtgagtgagtcaccggcttggcgagggtctcctctgacccacttagccttgccagcgctcagaactgccagccctgctgggtgcttgggacttttcaaagccctgggaattctccaagggtccacagtccttccaaccctcctgctaccatgaagattgcagtgattggacagagcctgtttggccaggaagtttactgccacctgaggaaggagggccacgaagtggtgggtgtgttcactgttccagacaaggatggaaaggccgaccccctgggtctggaagctgagaaggatggagtgccggtattcaagtactcccggtggcgtgcaaaaggacaggctttgcctgatgtggtggcaaaataccaggctttgggggccgagctcaacgtcctgcccttctgcagccaattcatccccatggagataatcagtgccccccggcatggctccatcatctatcacccgtcactgctccctaggcaccgaggggcctcggccatcaactggaccctcattcacggagataagaaaggggggttttccatcttctgggcggatgatggtctggacaccggagacctgctgctgcagaaggagtgtgaggtgctcccggac

SEQ ID NO: 28 - RNA, 583 nt, Homo sapiens
  source 1..583: mol_type = other RNA
gttctgtacctcacttctgatttctgcaagtcacttcctttttttttttgtctataaatttgttctgtccacgaggcaaccctggagtctctctgaatctgctgtgattctgagggctgcccaatttgtgaatcgttcattgctcaattaaacttttttaaatttaatttggctgaagtttttcttttaacatggtgtcagaagcgggatccaaagtacagcttctagcgacccccaggagtactgagtgaacaagcaaggtccttccaaccctcctgctaccatgaagattgcagtgattggacagagcctgtttggccaggaagtttactgccacctgaggaaggagggccacgaagtggtgggtgtgttcactgttccagacaaggatggaaaggccgaccccctgggtctggaagctgagaaggatggagtgccggtattcaagtactcccggtggcgtgcaaaaggacaggctttgcctgatgtggtggcaaaataccaggctttgggggccgagctcaacgtcctgcccttctgcagccaattcatccccatggagataatcagtgccccccggcat

SEQ ID NO: 29 - RNA, 583 nt, Homo sapiens
  source 1..583: mol_type = other RNA
ataaatttgttctgtccacgaggcaaccctggagtctctctgaatctgctgtgattctgagggctgcccaatttgtgaatcgttcattgctcaattaaacttttttaaatttaatttggctgaagtttttcttttaacatggtgtcagaagcgggatccaaagtacagcttctagcgacccccaggagtactgagtgaacaagcaaggtccttccaaccctcctgctaccatgaagattgcagtgattggacagagcctgtttggccaggaagtttactgccacctgaggaaggagggccacgaagtggtgggtgtgttcactgttccagacaaggatggaaaggccgaccccctggacaccaggacagagtgacagaggaggagaccggagaggagagccagtccagtcagggcccaaacatcacaccagaggctctaacagagaactgaatacaaagaagtgttccttgggtattgaagagtggaaggcagagagcccaaagttattggggacagcgactgcaggaagcagctgccactgtctggaagctgagaaggatggagtgccggtattcaagtact

SEQ ID NO: 30 - DNA, 3137 bp, Homo sapiens
  source 1..3137: mol_type = genomic DNA
acagtaagtcttcttgacctaagcgggaaagagcgcaggcccctgcggggttggcttttacatggcatttatagacccgcccggagagggtgcgctgcgctcccgccatagtcccaccaccggtgagcgccgcccccactcggctgactctccgcccgccccgcgcccctcccctcacgggctctggccttaaccagagctcgcggactggcggggacaggtcccacctcctggctcccaggacgggtctgcaccaacctcagtttcggggctgcggctcacagaagtctaacctgcccgggacgcccgcaccaactcctgcgcgcggtccttccaaccctcctgctaccatgaagattgcagtgattggacagagcctgtttggccaggaagtttactgccacctgaggaaggagggccacgaagtggtgggtgtgttcactgttccagacaaggatggaaaggccgaccccctgggtctggaagctgagaaggatggagtgccggtattcaagtactcccggtggcgtgcaaaaggacaggctttgcctgatgtggtggcaaaataccaggctttgggggccgagctcaacgtcctgcccttctgcagccaattcatccccatggagataatcagtgccccccggcatggctccatcatctatcacccgtcactgctccctaggcaccgaggggcctcggccatcaactggaccctcattcacggagataagaaaggggggttttccatcttctgggcggatgatggtctggacaccggagacctgctgctgcagaaggagtgtgaggtgctcccggacgacaccgtgagcacgctgtacaaccgcttcctcttccctgaaggcatcaaagggatggtgcaggccgtgaggctgatcgctgagggcaaagcccccagactccctcagcctgaggaaggagccacctatgaggggattcagaagaaggagacagccaagatcaactgggaccagccggcagaggccattcacaactggatccgcgggaacgacaaggtgccgggagcctggacagaggcctgtgaacagaaactgacatttttcaactcaacgctgaacacttcaggcctggtgcccgagggagacgctttgcccatcccaggagcccatcggccaggggtggtcaccaaagcaggactcatcctctttgggaatgatgacaaaatgctgctggtgaagaatattcagctggaggatggcaaaatgatcctggcctcgaacttctttaagggggcagccagcagtgtccttgagctgacagaggcagagctggttactgcggaggctgtgcggagtgtttggcagcggatcctccccaaagtcctggaggttgaagactccactgatttcttcaagtcaggggccgcgtctgtggacgttgtgaggctggtggaggaagtgaaggagctgtgtgatggcctggagttagaaaatgaagatgtgtacatggcatccacctttggggacttcatccagctgttagtgaggaagctgcgaggggacgatgaggagggcgagtgcagcattgactacgtggaaatggcagtgaacaagcgcactgtccgcatgccccaccagctcttcattgggggggagttcgtggatgccgagggcgccaagacctctgagaccatcaatcccaccgatggaagtgtcatctgccaggtatccctggcccaagtcaccgacgtcgacaaggcagtggccgcagccaaggatgcctttgagaatggacggtgggggaagatcagtgcgcgggaccggggccggctgatgtacagggctccaccatccccatcaaccaggccagacccaaccgcaacctgaccttgaccaggaaggagcctgttggggtttgtggcatcatcatcccctggaactatcccctgatgatgctgtcctggaagacagctgcctgcctggctgccgggaacacagtggtgatcaagcctgctcaggtgaccccactcacagccttgaagtttgcagagctgacattaaaggccggcattcccaaaggtgtggttaacgtcctcccaggatctggctccctggtcggccagagactctcagaccatcctgatgtgaggaaaatcgggttcacaggctccacagaggtgggcaagcacatcatgaaaagctgtgccataagtaacgtgaagaaggtgtccctggaactgggcgggaagtcacccctcatcatctttgctgactgtgacctcaacaaggctgtgcagatggggatgagttctgttttcttcaacaaaggagagaattgcattgcagcaggccgactctttgtggaggactccattcatgatgagttcgtgcggagagtggtagaagaggtgcggaagatgaaggtgggcaacccgctggacagggacaccgaccacgggccgcagaatcaccatgcccaccttgtgaagctgatggagtactgccagcatggcgtgaaggaaggggccacactggtctgcggcgggaatcaggtccctcggccagggttcttctttgagccaactgttttcacagacgtggaagaccacatgttcatagccaaggaggagtccttcgggcctgtcatgatcatctctcggtttgctgatggggacttggatgccgtgctgtctcgggccaatgccacggaatttggcctggcttctggtgtcttcaccagggacatcaacaaggccctgtatgtcagtgacaagctccaggcaggcactgtgtttgtcaacacgtacaacaagaccgacgtggccgctcccttcggaggattcaaacagtctggatttggcaaagatctaggagaggcggctctgaacgagtacctgcgggtcaagacagtgaccttcgaatactgaagaaaggtctttgtgagaagaaagtccctgcccctccctcgtggctggggccccctccctcttgagcctgggtgcacagcacctcccacctggggggctagtggaagccctcctgcctgcacaccatgtctgcatcttggacgccctctgtccagtcagaagcagcccttggctgggtgaggtgtgcccctcccagggagaataaagcttctgaagagagaccgtccac

SEQ ID NO: 31 - DNA, 3179 bp, Homo sapiens
  source 1..3179: mol_type = genomic DNA
tctgcggcaccaggactgagtagaagggagagagtggagaaggggaattgcagagagaaaaccaggggctgtttttctctcggagaggcgggtaggcactgggcgggcagaagcgccgctatccacccggatgcgcagctgctaaggggccgcctctgcaagcggctgcaaattcccggagggcagcgtctcctttcgctctgctgtgtccgtagcacatggcaggtccttccaaccctcctgctaccatgaagattgcagtgattggacagagcctgtttggccaggaagtttactgccacctgaggaaggagggccacgaagtggtgggtgtgttcactgttccagacaaggatggaaaggccgaccccctgggtctggaagctgagaaggatggagtgccggtattcaagtactcccggtggcgtgcaaaaggacaggctttgcctgatgtggtggcaaaataccaggctttgggggccgagctcaacgtcctgcccttctgcagccaattcatccccatggagataatcagtgccccccggcatggctccatcatctatcacccgtcactgctccctaggcaccgaggggcctcggccatcaactggaccctcattcacggagataagaaaggggggttttccatcttctgggcggatgatggtctggacaccggagacctgctgctgcagaaggagtgtgaggtgctcccggacgacaccgtgagcacgctgtacaaccgcttcctcttccctgaaggcatcaaagggatggtgcaggccgtgaggctgatcgctgagggcaaagcccccagactccctcagcctgaggaaggagccacctatgaggggattcagaagaaggagacagccaagatcaactgggaccagccggcagaggccattcacaactggatccgcgggaacgacaaggtgccgggagcctggacagaggcctgtgaacagaaactgacatttttcaactcaacgctgaacacttcaggcctggtgcccgagggagacgctttgcccatcccaggagcccatcggccaggggtggtcaccaaagcaggactcatcctctttgggaatgatgacaaaatgctgctggtgaagaatattcagctggaggatggcaaaatgatcctggcctcgaacttctttaagggggcagccagcagtgtccttgagctgacagaggcagagctggttactgcggaggctgtgcggagtgtttggcagcggatcctccccaaagtcctggaggttgaagactccactgatttcttcaagtcaggggccgcgtctgtggacgttgtgaggctggtggaggaagtgaaggagctgtgtgatggcctggagttagaaaatgaagatgtgtacatggcatccacctttggggacttcatccagctgttagtgaggaagctgcgaggggacgatgaggagggcgagtgcagcattgactacgtggaaatggcagtgaacaagcgcactgtccgcatgccccaccagctcttcattgggggggagttcgtggatgccgagggcgccaagacctctgagaccatcaatcccaccgatggaagtgtcatctgccaggtatccctggcccaagtcaccgacgtcgacaaggcagtggccgcagccaaggatgcctttgagaatggacggtgggggaagatcagtgcgcgggaccggggccggctgatgtacaggttggcagatctcatggagcagcaccaggaggagctggccaccattgaggccctggatgcgggtgccgtctacacgctggccctgaagacccacgtgggcatgtccatccagaccttccgctactttgctggctggtgtgacaagatccagggctccaccatccccatcaaccaggccagacccaaccgcaacctgaccttgaccaggaaggagcctgttggggtttgtggcatcatcatcccctggaactatcccctgatgatgctgtcctggaagacagctgcctgcctggctgccgggaacacagtggtgatcaagcctgctcaggtgaccccactcacagccttgaagtttgcagagctgacattaaaggccggcattcccaaaggtgtggttaacgtcctcccaggatctggctccctggtcggccagagactctcagaccatcctgatgtgaggaaaatcgggttcacaggctccacagaggtgggcaagcacatcatgaaaagctgtgccataagtaacgtgaagaaggtgtccctggaactgggcgggaagtcacccctcatcatctttgctgactgtgacctcaacaaggctgtgcagatggggatgagttctgttttcttcaacaaaggagagaattgcattgcagcaggccgactctttgtggaggactccattcatgatgagttcgtgcggagagtggtagaagaggtgcggaagatgaaggtgggcaacccgctggacagggacaccgaccacgggccgcagaatcaccatgcccaccttgtgaagctgatggagtactgccagcatggcgtgaaggaaggggccacactggtctgcggcgggaatcaggtccctcggccagggttcttctttgagccaactgttttcacagacgtggaagaccacatgttcatagccaaggaggagtccttcgggcctgtcatgatcatctctcggtttgctgatggggacttggatgccgtgctgtctcgggccaatgccacggaatttggcctggcttctggtgtcttcaccagggacatcaacaaggccctgtatgtcagtgacaagctccaggcaggcactgtgtttgtcaacacgtacaacaagaccgacgtggccgctcccttcggaggattcaaacagtctggatttggcaaagatctaggagaggcggctctgaacgagtacctgcgggtcaagacagtgaccttcgaatactgaagaaaggtctttgtgagaagaaagtccctgcccctccctcgtggctggggccccctccctcttgagcctgggtgcacagcacctcccacctggggggctagtggaagccctcctgcctgcacaccatgtctgcatcttggacgccctctgtccagtcagaagcagcccttggctgggtgaggtgtgcccctcccagggagaataaagcttctgaagagagac

SEQ ID NO: 32 - DNA, 3064 bp, Homo sapiens
  source 1..3064: mol_type = genomic DNA
acaggtcccacctcctggctcccaggacgggtctgcaccaacctcagtttcggggctgcggctcacagaagtctaacctgcccgggacgcccgcaccaactcctgcgcgcggtccttccaaccctcctgctaccatgaagattgcagtgattggacagagcctgtttggccaggaagtttactgccacctgaggaaggagggccacgaagtggtgggtgtgttcactgttccagacaaggatggaaaggccgaccccctgggtctggaagctgagaaggatggagtgccggtattcaagtactcccggtggcgtgcaaaaggacaggctttgcctgatgtggtggcaaaataccaggctttgggggccgagctcaacgtcctgcccttctgcagccaattcatccccatggagataatcagtgccccccggcatggctccatcatctatcacccgtcactgctccctaggcaccgaggggcctcggccatcaactggaccctcattcacggagataagaaaggggggttttccatcttctgggcggatgatggtctggacaccggagacctgctgctgcagaaggagtgtgaggtgctcccggacgacaccgtgagcacgctgtacaaccgcttcctcttccctgaaggcatcaaagggatggtgcaggccgtgaggctgatcgctgagggcaaagcccccagactccctcagcctgaggaaggagccacctatgaggggattcagaagaaggagacagccaagatcaactgggaccagccggcagaggccattcacaactggatccgcgggaacgacaaggtgccgggagcctggacagaggcctgtgaacagaaactgacatttttcaactcaacgctgaacacttcaggcctggtgcccgagggagacgctttgcccatcccaggagcccatcggccaggggtggtcaccaaagcaggactcatcctctttgggaatgatgacaaaatgctgctggtgaagaatattcagctggaggatggcaaaatgatcctggcctcgaacttctttaagggggcagccagcagtgtccttgagctgacagaggcagagctggttactgcggaggctgtgcggagtgtttggcagcggatcctccccaaagtcctggaggttgaagactccactgatttcttcaagtcaggggccgcgtctgtggacgttgtgaggctggtggaggaagtgaaggagctgtgtgatggcctggagttagaaaatgaagatgtgtacatggcatccacctttggggacttcatccagctgttagtgaggaagctgcgaggggacgatgaggagggcgagtgcagcattgactacgtggaaatggcagtgaacaagcgcactgtccgcatgccccaccagctcttcattgggggggagttcgtggatgccgagggcgccaagacctctgagaccatcaatcccaccgatggaagtgtcatctgccaggtatccctggcccaagtcaccgacgtcgacaaggcagtggccgcagccaaggatgcctttgagaatggacggtgggggaagatcagtgcgcgggaccggggccggctgatgtacaggttggcagatctcatggagcagcaccaggaggagctggccaccattgaggccctggatgcgggtgccgtctacacgctggccctgaagacccacgtgggcatgtccatccagaccttccgctactttgctggctggtgtgacaagatccagggctccaccatccccatcaaccaggccagacccaaccgcaacctgaccttgaccaggaaggagcctgttggggtttgtggcatcatcatcccctggaactatcccctgatgatgctgtcctggaagacagctgcctgcctggctgccgggaacacagtggtgatcaagcctgctcaggtgaccccactcacagccttgaagtttgcagagctgacattaaaggccggcattcccaaaggtgtggttaacgtcctcccaggatctggctccctggtcggccagagactctcagaccatcctgatgtgaggaaaatcgggttcacaggctccacagaggtgggcaagcacatcatgaaaagctgtgccataagtaacgtgaagaaggtgtccctggaactgggcgggaagtcacccctcatcatctttgctgactgtgacctcaacaaggctgtgcagatggggatgagttctgttttcttcaacaaaggagagaattgcattgcagcaggccgactctttgtggaggactccattcatgatgagttcgtgcggagagtggtagaagaggtgcggaagatgaaggtgggcaacccgctggacagggacaccgaccacgggccgcagaatcaccatgcccaccttgtgaagctgatggagtactgccagcatggcgtgaaggaaggggccacactggtctgcggcgggaatcaggtccctcggccagggttcttctttgagccaactgttttcacagacgtggaagaccacatgttcatagccaaggaggagtccttcgggcctgtcatgatcatctctcggtttgctgatggggacttggatgccgtgctgtctcgggccaatgccacggaatttggcctggcttctggtgtcttcaccagggacatcaacaaggccctgtatgtcagtgacaagctccaggcaggcactgtgtttgtcaacacgtacaacaagaccgacgtggccgctcccttcggaggattcaaacagtctggatttggcaaagatctaggagaggcggctctgaacgagtacctgcgggtcaagacagtgaccttcgaatactgaagaaaggtctttgtgagaagaaagtccctgcccctccctcgtggctggggccccctccctcttgagcctgggtgcacagcacctcccacctggggggctagtggaagccctcctgcctgcacaccatgtctgcatcttggacgccctctgtccagtcagaagcagcccttggctgggtgaggtgtgcccctcccagggagaataaagcttctgaagagaga

SEQ ID NO: 33 - DNA, 3157 bp, Homo sapiens
  source 1..3157: mol_type = genomic DNA
actgcgctcaagtggacggtcgcgcgtgcagagggaggccggatagcagaccccacaacgtggctcctggggccccgctatcgagagctcaggccccgcgggcacttgcctaggagaggaaagaatcttcccaaagtgcagacagagacggaatttaatcaggagtcccagacttggagtttggaggcatgggctctggtgtcaggtccttccaaccctcctgctaccatgaagattgcagtgattggacagagcctgtttggccaggaagtttactgccacctgaggaaggagggccacgaagtggtgggtgtgttcactgttccagacaaggatggaaaggccgaccccctgggtctggaagctgagaaggatggagtgccggtattcaagtactcccggtggcgtgcaaaaggacaggctttgcctgatgtggtggcaaaataccaggctttgggggccgagctcaacgtcctgcccttctgcagccaattcatccccatggagataatcagtgccccccggcatggctccatcatctatcacccgtcactgctccctaggcaccgaggggcctcggccatcaactggaccctcattcacggagataagaaaggggggttttccatcttctgggcggatgatggtctggacaccggagacctgctgctgcagaaggagtgtgaggtgctcccggacgacaccgtgagcacgctgtacaaccgcttcctcttccctgaaggcatcaaagggatggtgcaggccgtgaggctgatcgctgagggcaaagcccccagactccctcagcctgaggaaggagccacctatgaggggattcagaagaaggagacagccaagatcaactgggaccagccggcagaggccattcacaactggatccgcgggaacgacaaggtgccgggagcctggacagaggcctgtgaacagaaactgacatttttcaactcaacgctgaacacttcaggcctggtgcccgagggagacgctttgcccatcccaggagcccatcggccaggggtggtcaccaaagcaggactcatcctctttgggaatgatgacaaaatgctgctggtgaagaatattcagctggaggatggcaaaatgatcctggcctcgaacttctttaagggggcagccagcagtgtccttgagctgacagaggcagagctggttactgcggaggctgtgcggagtgtttggcagcggatcctccccaaagtcctggaggttgaagactccactgatttcttcaagtcaggggccgcgtctgtggacgttgtgaggctggtggaggaagtgaaggagctgtgtgatggcctggagttagaaaatgaagatgtgtacatggcatccacctttggggacttcatccagctgttagtgaggaagctgcgaggggacgatgaggagggcgagtgcagcattgactacgtggaaatggcagtgaacaagcgcactgtccgcatgccccaccagctcttcattgggggggagttcgtggatgccgagggcgccaagacctctgagaccatcaatcccaccgatggaagtgtcatctgccaggtatccctggcccaagtcaccgacgtcgacaaggcagtggccgcagccaaggatgcctttgagaatggacggtgggggaagatcagtgcgcgggaccggggccggctgatgtacaggttggcagatctcatggagcagcaccaggaggagctggccaccattgaggccctggatgcgggtgccgtctacacgctggccctgaagacccacgtgggcatgtccatccagaccttccgctactttgctggctggtgtgacaagatccagggctccaccatccccatcaaccaggccagacccaaccgcaacctgaccttgaccaggaaggagcctgttggggtttgtggcatcatcatcccctggaactatcccctgatgatgctgtcctggaagacagctgcctgcctggctgccgggaacacagtggtgatcaagcctgctcaggtgaccccactcacagccttgaagtttgcagagctgacattaaaggccggcattcccaaaggtgtggttaacgtcctcccaggatctggctccctggtcggccagagactctcagaccatcctgatgtgaggaaaatcgggttcacaggctccacagaggtgggcaagcacatcatgaaaagctgtgccataagtaacgtgaagaaggtgtccctggaactgggcgggaagtcacccctcatcatctttgctgactgtgacctcaacaaggctgtgcagatggggatgagttctgttttcttcaacaaaggagagaattgcattgcagcaggccgactctttgtggaggactccattcatgatgagttcgtgcggagagtggtagaagaggtgcggaagatgaaggtgggcaacccgctggacagggacaccgaccacgggccgcagaatcaccatgcccaccttgtgaagctgatggagtactgccagcatggcgtgaaggaaggggccacactggtctgcggcgggaatcaggtccctcggccagggttcttctttgagccaactgttttcacagacgtggaagaccacatgttcatagccaaggaggagtccttcgggcctgtcatgatcatctctcggtttgctgatggggacttggatgccgtgctgtctcgggccaatgccacggaatttggcctggcttctggtgtcttcaccagggacatcaacaaggccctgtatgtcagtgacaagctccaggcaggcactgtgtttgtcaacacgtacaacaagaccgacgtggccgctcccttcggaggattcaaacagtctggatttggcaaagatctaggagaggcggctctgaacgagtacctgcgggtcaagacagtgaccttcgaatactgaagaaaggtctttgtgagaagaaagtccctgcccctccctcgtggctggggccccctccctcttgagcctgggtgcacagcacctcccacctggggggctagtggaagccctcctgcctgcacaccatgtctgcatcttggacgccctctgtccagtcagaagcagcccttggctgggtgaggtgtgcccctcccagggagaataaagcttctgaagagag

SEQ ID NO: 34 - DNA, 2758 bp, Homo sapiens
  source 1..2758: mol_type = genomic DNA
acaggtcccacctcctggctcccaggacgggtctgcaccaacctcagtttcggggctgcggctcacagaagtctaacctgcccgggacgcccgcaccaactcctgcgcgcggtccttccaaccctcctgctaccatgaagattgcagtgattggacagagcctgtttggccaggaagtttactgccacctgaggaaggagggccacgaagtggtgggtgtgttcactgttccagacaaggatggaaaggccgaccccctgggtctggaagctgagaaggatggagtgccggtattcaagtactcccggtggcgtgcaaaaggacaggctttgcctgatgtggtggcaaaataccaggctttgggggccgagctcaacgtcctgcccttctgcagccaattcatccccatggagataatcagtgccccccggcatggctccatcatctatcacccgtcactgctccctaggcaccgaggggcctcggccattcacaactggatccgcgggaacgacaaggtgccgggagcctggacagaggcctgtgaacagaaactgacatttttcaactcaacgctgaacacttcaggcctggtgcccgagggagacgctttgcccatcccaggagcccatcggccaggggtggtcaccaaagcaggactcatcctctttgggaatgatgacaaaatgctgctggtgaagaatattcagctggaggatggcaaaatgatcctggcctcgaacttctttaagggggcagccagcagtgtccttgagctgacagaggcagagctggttactgcggaggctgtgcggagtgtttggcagcggatcctccccaaagtcctggaggttgaagactccactgatttcttcaagtcaggggccgcgtctgtggacgttgtgaggctggtggaggaagtgaaggagctgtgtgatggcctggagttagaaaatgaagatgtgtacatggcatccacctttggggacttcatccagctgttagtgaggaagctgcgaggggacgatgaggagggcgagtgcagcattgactacgtggaaatggcagtgaacaagcgcactgtccgcatgccccaccagctcttcattgggggggagttcgtggatgccgagggcgccaagacctctgagaccatcaatcccaccgatggaagtgtcatctgccaggtatccctggcccaagtcaccgacgtcgacaaggcagtggccgcagccaaggatgcctttgagaatggacggtgggggaagatcagtgcgcgggaccggggccggctgatgtacaggttggcagatctcatggagcagcaccaggaggagctggccaccattgaggccctggatgcgggtgccgtctacacgctggccctgaagacccacgtgggcatgtccatccagaccttccgctactttgctggctggtgtgacaagatccagggctccaccatccccatcaaccaggccagacccaaccgcaacctgaccttgaccaggaaggagcctgttggggtttgtggcatcatcatcccctggaactatcccctgatgatgctgtcctggaagacagctgcctgcctggctgccgggaacacagtggtgatcaagcctgctcaggtgaccccactcacagccttgaagtttgcagagctgacattaaaggccggcattcccaaaggtgtggttaacgtcctcccaggatctggctccctggtcggccagagactctcagaccatcctgatgtgaggaaaatcgggttcacaggctccacagaggtgggcaagcacatcatgaaaagctgtgccataagtaacgtgaagaaggtgtccctggaactgggcgggaagtcacccctcatcatctttgctgactgtgacctcaacaaggctgtgcagatggggatgagttctgttttcttcaacaaaggagagaattgcattgcagcaggccgactctttgtggaggactccattcatgatgagttcgtgcggagagtggtagaagaggtgcggaagatgaaggtgggcaacccgctggacagggacaccgaccacgggccgcagaatcaccatgcccaccttgtgaagctgatggagtactgccagcatggcgtgaaggaaggggccacactggtctgcggcgggaatcaggtccctcggccagggttcttctttgagccaactgttttcacagacgtggaagaccacatgttcatagccaaggaggagtccttcgggcctgtcatgatcatctctcggtttgctgatggggacttggatgccgtgctgtctcgggccaatgccacggaatttggcctggcttctggtgtcttcaccagggacatcaacaaggccctgtatgtcagtgacaagctccaggcaggcactgtgtttgtcaacacgtacaacaagaccgacgtggccgctcccttcggaggattcaaacagtctggatttggcaaagatctaggagaggcggctctgaacgagtacctgcgggtcaagacagtgaccttcgaatactgaagaaaggtctttgtgagaagaaagtccctgcccctccctcgtggctggggccccctccctcttgagcctgggtgcacagcacctcccacctggggggctagtggaagccctcctgcctgcacaccatgtctgcatcttggacgccctctgtccagtcagaagcagcccttggctgggtgaggtgtgcccctcccagggagaataaagcttctgaagag

SEQ ID NO: 35 - DNA, 2797 bp, Homo sapiens
  source 1..2797: mol_type = genomic DNA
ctcctggctcccaggacgggtctgcaccaacctcagtttcggggctgcggctcacagaagtctaacctgcccgggacgcccgcaccaactcctgcgcgcggtccttccaaccctcctgctaccatgaagattgcagtgattggacagagcctgtttggccaggaagtttactgccacctgaggaaggagggccacgaagtggtgggtgtgttcactgttccagacaaggatggaaaggccgaccccctgggtctggaagctgagaaggatggagtgccggtattcaagtactcccggtggcgtgcaaaaggacaggctttgcctgatgtggtggcaaaataccaggctttgggggccgagctcaacgtcctgcccttctgcagccaattcatccccatggagataatcagtgccccccggcatggctccatcatctatcacccgtcactgctccctaggcaccgaggggcctcggccatcaactggaccctcattcacggagataagaaaggggggttttccatcttctgggcggatgatggtctggacaccggagacctgctgctgcagaaggagtgtgaggtgctcccggacgacaccgtgagcacgctgtacaaccgcttcctcttccctgaaggcatcaaagggatggtgcaggccgtgaggctgatcgctgagggcaaagcccccagactccctcagcctgaggaaggagccacctatgaggggattcagaagaaggagacagccaagatcaactgggaccagccggcagaggccattcacaactggatccgcgggaacgacaaggtgccgggagcctggacagaggcctgtgaacagaaactgacatttttcaactcaacgctgaacacttcaggcctggtgcccgagggagacgctttgcccatcccaggagcccatcggccaggggtggtcaccaaagcaggactcatcctctttgggaatgatgacaaaatgctgctggtgaagaatattcagctggaggatggcaaaatgatcctggcctcgaacttctttaagggggcagccagcagtgtccttgagctgacagaggcagagctggttactgcggaggctgtgcggagtgtttggcagcggatcctccccaaagtcctggaggttgaagactccactgatttcttcaagtcaggggccgcgtctgtggacgttgtgaggctggtggaggaagtgaaggagctgtgtgatggcctggagttagaaaatgaagatgtgtacatggcatccacctttggggacttcatccagctgttagtgaggaagctgcgaggggacgatgaggagggcgagtgcagcattgactacgtggaaatggcagtgaacaagcgcactgtccgcatgccccaccagctcttcattgggggggagttcgtggatgccgagggcgccaagacctctgagaccatcaatcccaccgatggaagtgtcatctgccaggtatccctggcccaagtcaccgacgtcgacaaggcagtggccgcagccaaggatgcctttgagaatggacggtgggggaagatcagtgcgcgggaccggggccggctgatgtacagggctccaccatccccatcaaccaggccagacccaaccgcaacctgaccttgaccaggaaggagcctgttggggtttgtggcatcatcatcccctggaactatcccctgatgatgctgtcctggaagacagctgcctgcctggctgccgggaacacagtggtgatcaagcctgctcaggtgaccccactcacagccttgaagtttgcagagctgacattaaaggccggcattcccaaaggtgtggttaacgtcctcccaggatctggctccctggtcggccagagactctcagaccatcctgatgtgaggaaaatcgggttcacaggctccacagaggtgggcaagcacatcatgaaaaggggatgagttctgttttcttcaacaaaggagagaattgcattgcagcaggccgactctttgtggaggactccattcatgatgagttcgtgcggagagtggtagaagaggtgcggaagatgaaggtgggcaacccgctggacagggacaccgaccacgggccgcagaatcaccatgcccaccttgtgaagctgatggagtactgccagcatggcgtgaaggaaggggccacactggtctgcggcgggaatcaggtccctcggccagggttcttctttgagccaactgttttcacagacgtggaagaccacatgttcatagccaaggaggagtccttcgggcctgtcatgatcatctctcggtttgctgatggggacttggatgccgtgctgtctcgggccaatgccacggaatttggcctggcttctggtgtcttcaccagggacatcaacaaggccctgtatgtcagtgacaagctccaggcaggcactgtgtttgtcaacacgtacaacaagaccgacgtggccgctcccttcggaggattcaaacagtctggatttggcaaagatctaggagaggcggctctgaacgagtacctgcgggtcaagacagtgaccttcgaatactgaagaaaggtctttgtgagaagaaagtccctgcccctccctcgtggctggggccccctccctcttgagcctgggtgcacagcacctcccacctggggggctagtggaagccctcctgcctgcacaccatgtctgcatcttggacgccctctgtccagtcagaagcagcccttggctgggtgaggtgtgcccctcccagggagaataaagcttctgaag

SEQ ID NO: 36 - DNA, 2761 bp, Homo sapiens
  source 1..2761: mol_type = genomic DNA
acaggtcccacctcctggctcccaggacgggtctgcaccaacctcagtttcggggctgcggctcacagaagtctaacctgcccgggacgcccgcaccaactcctgcgcgcggtccttccaaccctcctgctaccatgaagattgcagtgattggacagagcctgtttggccaggaagtttactgccacctgaggaaggagggccacgaagtggtgggtgtgttcactgttccagacaaggatggaaaggccgaccccctgggtctggaagctgagaaggatggagtgccggtattcaagtactcccggtggcgtgcaaaaggacaggctttgcctgatgtggtggcaaaataccaggctttgggggccgagctcaacgtcctgcccttctgcagccaattcatccccatggagataatcagtgccccccggcatggctccatcatctatcacccgtcactgctccctaggcaccgaggggcctcggccattcacaactggatccgcgggaacgacaaggtgccgggagcctggacagaggcctgtgaacagaaactgacatttttcaactcaacgctgaacacttcaggcctggtgcccgagggagacgctttgcccatcccaggagcccatcggccaggggtggtcaccaaagcaggactcatcctctttgggaatgatgacaaaatgctgctggtgaagaatattcagctggaggatggcaaaatgatcctggcctcgaacttctttaagggggcagccagcagtgtccttgagctgacagaggcagagctggttactgcggaggctgtgcggagtgtttggcagcggatcctccccaaagtcctggaggttgaagactccactgatttcttcaagtcaggggccgcgtctgtggacgttgtgaggctggtggaggaagtgaaggagctgtgtgatggcctggagttagaaaatgaagatgtgtacatggcatccacctttggggacttcatccagctgttagtgaggaagctgcgaggggacgatgaggagggcgagtgcagcattgactacgtggaaatggcagtgaacaagcgcactgtccgcatgccccaccagctcttcattgggggggagttcgtggatgccgagggcgccaagacctctgagaccatcaatcccaccgatggaagtgtcatctgccaggtatccctggcccaagtcaccgacgtcgacaaggcagtggccgcagccaaggatgcctttgagaatggacggtgggggaagatcagtgcgcgggaccggggccggctgatgtacaggttggcagatctcatggagcagcaccaggaggagctggccaccattgaggccctggatgcgggtgccgtctacacgctggccctgaagacccacgtgggcatgtccatccagaccttccgctactttgctggctggtgtgacaagatccagggctccaccatccccatcaaccaggccagacccaaccgcaacctgaccttgaccaggaaggagcctgttggggtttgtggcatcatcatcccctggaactatcccctgatgatgctgtcctggaagacagctgcctgcctggctgccgggaacacagtggtgatcaagcctgctcaggtgaccccactcacagccttgaagtttgcagagctgacattaaaggccggcattcccaaaggtgtggttaacgtcctcccaggatctggctccctggtcggccagagactctcagaccatcctgatgtgaggaaaatcgggttcacaggctccacagaggtgggcaagcacatcatgaaaagctgtgccataagtaacgtgaagaaggtgtccctggaactgggcgggaagtcacccctcatcatctttgctgactgtgacctcaacaaggctgtgcagatggggatgagttctgttttcttcaacaaaggagagaattgcattgcagcaggccgactctttgtggaggactccattcatgatgagttcgtgcggagagtggtagaagaggtgcggaagatgaaggtgggcaacccgctggacagggacaccgaccacgggccgcagaatcaccatgcccaccttgtgaagctgatggagtactgccagcatggcgtgaaggaaggggccacactggtctgcggcgggaatcaggtccctcggccagggttcttctttgagccaactgttttcacagacgtggaagaccacatgttcatagccaaggaggagtccttcgggcctgtcatgatcatctctcggtttgctgatggggacttggatgccgtgctgtctcgggccaatgccacggaatttggcctggcttctggtgtcttcaccagggacatcaacaaggccctgtatgtcagtgacaagctccaggcaggcactgtgtttgtcaacacgtacaacaagaccgacgtggccgctcccttcggaggattcaaacagtctggatttggcaaagatctaggagaggcggctctgaacgagtacctgcgggtcaagacagtgaccttcgaatactgaagaaaggtctttgtgagaagaaagtccctgcccctccctcgtggctggggccccctccctcttgagcctgggtgcacagcacctcccacctggggggctagtggaagccctcctgcctgcacaccatgtctgcatcttggacgccctctgtccagtcagaagcagcccttggctgggtgaggtgtgcccctcccagggagaataaagcttctgaagagaga

SEQ ID NO: 37 - DNA, 3178 bp, Homo sapiens
  source 1..3178: mol_type = genomic DNA
tctgcggcaccaggactgagtagaagggagagagtggagaaggggaattgcagagagaaaaccaggggctgtttttctctcggagaggcgggtaggcactgggcgggcagaagcgccgctatccacccggatgcgcagctgctaaggggccgcctctgcaagcggctgcaaattcccggagggcagcgtctcctttcgctctgctgtgtccgtagcacatggcaggtccttccaaccctcctgctaccatgaagattgcagtgattggacagagcctgtttggccaggaagtttactgccacctgaggaaggagggccacgaagtggtgggtgtgttcactgttccagacaaggatggaaaggccgaccccctgggtctggaagctgagaaggatggagtgccggtattcaagtactcccggtggcgtgcaaaaggacaggctttgcctgatgtggtggcaaaataccaggctttgggggccgagctcaacgtcctgcccttctgcagccaattcatccccatggagataatcagtgccccccggcatggctccatcatctatcacccgtcactgctccctaggcaccgaggggcctcggccatcaactggaccctcattcacggagataagaaaggggggttttccatcttctgggcggatgatggtctggacaccggagacctgctgctgcagaaggagtgtgaggtgctcccggacgacaccgtgagcacgctgtacaaccgcttcctcttccctgaaggcatcaaagggatggtgcaggccgtgaggctgatcgctgagggcaaagcccccagactccctcagcctgaggaaggagccacctatgaggggattcagaagaaggagacagccaagatcaactgggaccagccggcagaggccattcacaactggatccgcgggaacgacaaggtgccgggagcctggacagaggcctgtgaacagaaactgacatttttcaactcaacgctgaacacttcaggcctggtgcccgagggagacgctttgcccatcccaggagcccatcggccaggggtggtcaccaaagcaggactcatcctctttgggaatgatgacaaaatgctgctggtgaagaatattcagctggaggatggcaaaatgatcctggcctcgaacttctttaagggggcagccagcagtgtccttgagctgacagaggcagagctggttactgcggaggctgtgcggagtgtttggcagcggatcctccccaaagtcctggaggttgaagactccactgatttcttcaagtcaggggccgcgtctgtggacgttgtgaggctggtggaggaagtgaaggagctgtgtgatggcctggagttagaaaatgaagatgtgtacatggcatccacctttggggacttcatccagctgttagtgaggaagctgcgaggggacgatgaggagggcgagtgcagcattgactacgtggaaatggcagtgaacaagcgcactgtccgcatgccccaccagctcttcattgggggggagttcgtggatgccgagggcgccaagacctctgagaccatcaatcccaccgatggaagtgtcatctgccaggtatccctggcccaagtcaccgacgtcgacaaggcagtggccgcagccaaggatgcctttgagaatggacggtgggggaagatcagtgcgcgggaccggggccggctgatgtacaggttggcagatctcatggagcagcaccaggaggagctggccaccattgaggccctggatgcgggtgccgtctacacgctggccctgaagacccacgtgggcatgtccatccagaccttccgctactttgctggctggtgtgacaagatccagggctccaccatccccatcaaccaggccagacccaaccgcaacctgaccttgaccaggaaggagcctgttggggtttgtggcatcatcatcccctggaactatcccctgatgatgctgtcctggaagacagctgcctgcctggctgccgggaacacagtggtgatcaagcctgctcaggtgaccccactcacagccttgaagtttgcagagctgacattaaaggccggcattcccaaaggtgtggttaacgtcctcccaggatctggctccctggtcggccagagactctcagaccatcctgatgtgaggaaaatcgggttcacaggctccacagaggtgggcaagcacatcatgaaaagctgtgccataagtaacgtgaagaaggtgtccctggaactgggcgggaagtcacccctcatcatctttgctgactgtgacctcaacaaggctgtgcagatggggatgagttctgttttcttcaacaaaggagagaattgcattgcagcaggccgactctttgtggaggactccattcatgatgagttcgtgcggagagtggtagaagaggtgcggaagatgaaggtgggcaacccgctggacagggacaccgaccacgggccgcagaatcaccatgcccaccttgtgaagctgatggagtactgccagcatggcgtgaaggaaggggccacactggtctgcggcgggaatcaggtccctcggccagggttcttctttgagccaactgttttcacagacgtggaagaccacatgttcatagccaaggaggagtccttcgggcctgtcatgatcatctctcggtttgctgatggggacttggatgccgtgctgtctcgggccaatgccacggaatttggcctggcttctggtgtcttcaccagggacatcaacaaggccctgtatgtcagtgacaagctccaggcaggcactgtgtttgtcaacacgtacaacaagaccgacgtggccgctcccttcggaggattcaaacagtctggatttggcaaagatctaggagaggcggctctgaacgagtacctgcgggtcaagacagtgaccttcgaatactgaagaaaggtctttgtgagaagaaagtccctgcccctccctcgtggctggggccccctccctcttgagcctgggtgcacagcacctcccacctggggggctagtggaagccctcctgcctgcacaccatgtctgcatcttggacgccctctgtccagtcagaagcagcccttggctgggtgaggtgtgcccctcccagggagaataaagcttctgaagagaga

SEQ ID NO: 38 - DNA, 3097 bp, Homo sapiens
  source 1..3097: mol_type = genomic DNA
aggtcccacctcctggctcccaggacgggtctgcaccaacctcagtttcggggctgcggctcacagaagtctaacctgcccgggacgcccgcaccaactcctgcgcgcggtccttccaaccctcctgctaccatgaagattgcagtgattggacagagcctgtttggccaggaagtttactgccacctgaggaaggagggccacgaagtggtgggtgtgttcactgttccagacaaggatggaaaggccgaccccctgggtctggaagctgagaaggatggagtgccggtattcaagtactcccggtggcgtgcaaaaggacaggctttgcctgatgtggtggcaaaataccaggctttgggggccgagctcaacgtcctgcccttctgcagccaattcatccccatggagataatcagtgccccccggcatggctccatcatctatcacccgtcactgctccctaggcaccgaggggcctcggccatcaactggaccctcattcacggagataagaaaggggggttttccatcttctgggcggatgatggtctggacaccggagacctgctgctgcagaaggagtgtgaggtgctcccggacgacaccgtgagcacgctgtacaaccgcttcctcttccctgaaggcatcaaagggatggtgcaggccgtgaggctgatcgctgagggcaaagcccccagactccctcagcctgaggaaggagccacctatgaggggattcagaagaaggagacagccaagatcaactgggaccagccggcagaggccattcacaactggatccgcgggaacgacaaggtgccgggagcctggacagaggcctgtgaacagaaactgacatttttcaactcaacgctgaacacttcaggcctggtgcccgagggagacgctttgcccatcccaggagcccatcggccaggggtggtcaccaaagcaggactcatcctctttgggaatgatgacagaatgctgctggtgaagaatattcagctggaggatggcaaaatgatcctggcctcgaacttctttaagggggcagccagcagtgtccttgagctgacagaggcagagctggttactgcggaggctgtgcggagtgtttggcagcggatcctccccaaagtcctggaggttgaagactccactgatttcttcaagtcaggggccgcgtctgtggacgttgtgaggctggtggaggaagtgaaggagctgtgtgatggcctggagttagaaaatgaagatgtgtacatggcatccacctttggggacttcatccagctgttagtgaggaagctgcgaggggacgatgaggagggcgagtgcagcattgactacgtggaaatggcagtgaacaagcgcactgtccgcatgccccaccagctcttcattgggggggagttcgtggatgccgagggcgccaagacctctgagaccatcaatcccaccgatggaagtgtcatctgccaggtatccctggcccaagtcaccgacgtcgacaaggcagtggccgcagccaaggatgcctttgagaatggacggtgggggaagatcagtgcgcgggaccggggccggctgatgtacaggttggcagatctcatggagcagcaccaggaggagctggccaccattgaggccctggatgcgggtgccgtctacacgctggccctgaagacccacgtgggcatgtccatccagaccttccgctactttgctggctggtgtgacaagatccagggctccaccatccccatcaaccaggccagacccaaccgcaacctgaccttgaccaggaaggagcctgttggggtttgtggcatcatcatcccctggaactatcccctgatgatgctgtcctggaagacagctgcctgcctggctgccgggaacacagtggtgatcaagcctgctcaggtgaccccactcacagccttgaagtttgcagagctgacattaaaggccggcattcccaaaggtgtggttaacgtcctcccaggatctggctccctggtcggccagagactctcagaccatcctgatgtgaggaaaatcgggttcacaggctccacagaggtgggcaagcacatcatgaaaagctgtgccataagtaacgtgaagaaggtgtccctggaactgggcgggaagtcacccctcatcatctttgctgactgtgacctcaacaaggctgtgcagatggggatgagttctgttttcttcaacaaaggagagaattgcattgcagcaggccgactctttgtggaggactccattcatgatgagttcgtgcggagagtggtagaagaggtgcggaagatgaaggtgggcaacccgctggacagggacaccgaccacgggccgcagaatcaccatgcccaccttgtgaagctgatggagtactgccagcatggcgtgaaggaaggggccacactggtctgcggcgggaatcaggtccctcggccagggttcttctttgagccaactgttttcacagacgtggaagaccacatgttcatagccaaggaggagtccttcgggcctgtcatgatcatctctcggtttgctgatggggacttggatgccgtgctgtctcgggccaatgccacggaatttggcctggcttctggtgtcttcaccagggacatcaacaaggccctgtatgtcagtgacaagctccaggcaggcactgtgtttgtcaacacgtacaacaagaccgacgtggccgctcccttcggaggattcaaacagtctggatttggcaaagatctaggagaggcggctctgaacgagtacctgcgggtcaagacagtgaccttcgaatactgaagaaaggtctttgtgagaagaaagtccctgcccctccctcgtggctggggccccctccctcttgagcctgggtgcacagcacctcccacctggggggctagtggaagccctcctgcctgcacaccatgtctgcatcttggacgccctctgtccagtcagaagcagcccttggctgggtgaggtgtgcccctcccagggagaataaagcttctgaagagagaccgtccacaaaaaaaaaaaaaaaaaaaaaaaaaaa

SEQ ID NO: 39 - DNA, 3195 bp, Homo sapiens
  source 1..3195: mol_type = genomic DNA
tctgcggcaccaggactgagtagaagggagagagtggagaaggggaattgcagagagaaaaccaggggctgtttttctctcggagaggcgggtaggcactgggcgggcagaagcgccgctatccacccggatgcgcagctgctaaggggccgcctctgcaagcggctgcaaattcccggagggcagcgtctcctttcgctctgctgtgtccgtagcacatggcaggtccttccaaccctcctgctaccatgaagattgcagtgattggacagagcctgtttggccaggaagtttactgccacctgaggaaggagggccacgaagtggtgggtgtgttcactgttccagacaaggatggaaaggccgaccccctgggtctggaagctgagaaggatggagtgccggtattcaagtactcccggtggcgtgcaaaaggacaggctttgcctgatgtggtggcaaaataccaggctttgggggccgagctcaacgtcctgcccttctgcagccaattcatccccatggagataatcagtgccccccggcatggctccatcatctatcacccgtcactgctccctaggcaccgaggggcctcggccatcaactggaccctcattcacggagataagaaaggggggttttccatcttctgggcggatgatggtctggacaccggagacctgctgctgcagaaggagtgtgaggtgctcccggacgacaccgtgagcacgctgtacaaccgcttcctcttccctgagggcatcaaagggatggtgcaggccgtgaggctgatcgctgagggcaaagcccccagactccctcagcctgaggaaggagccacctatgaggggattcagaagaaggagacagccaagatcaactgggaccagccggcagaggccattcacaactggatccgcgggaacgacaaggtgccgggagcctggacagaggcctgtgaacagaaactgacatttttcaactcaacgctgaacacttcaggcctggtgcccgagggagacgctttgcccatcccaggagcccatcggccaggggtggtcaccaaagcaggactcatcctctttgggaatgatgacaaaatgctgctggtgaagaatattcagctggaggatggcaaaatgatcctggcctcgaacttctttaagggggcagccagcagtgtccttgagctgacagaggcagagctggttactgcggaggctgtgcggagtgtttggcagcggatcctccccaaagtcctggaggttgaagactccactgatttcttcaagtcaggggccgcgtctgtggacgttgtgaggctggtggaggaagtgaaggagctgtgtgatggcctggagttagaaaatgaagatgtgtacatggcatccacctttggggacttcatccagctgttagtgaggaagctgcgaggggacgatgaggagggcgagtgcagcattgactacgtggaaatggcagtgaacaagcgcactgtccgcatgccccaccagctcttcattgggggggagttcgtggacgccgagggcgccaagacctctgagaccatcaatcccaccgatggaagtgtcatctgccaggtatccctggcccaagtcaccgacgtcgacaaggcagtggccgcagccaaggatgcctttgagaatggacggtgggggaagatcagtgcgcgggaccggggccggctgatgtacaggttggcagatctcatggagcagcaccaggaggagctggccaccattgaggccctggatgcgggtgccgtctacacgctggccctgaagacccacgtgggcatgtccatccagaccttccgctactttgctggctggtgtgacaagatccagggctccaccatccccatcaaccaggccagacccaaccgcaacctgaccttgaccaggaaggagcctgttggggtttgtggcatcatcatcccctggaactatcccctgatgatgctgtcctggaagacagctgcctgcctggctgccgggaacacagtggtgatcaagcctgctcaggtgaccccactcacagccttgaagtttgcagagctgacattaaaggccggcattcccaaaggtgtggttaacgtcctcccaggatctggctccctggtcggccagagactctcagaccatcctgatgtgaggaaaatcgggttcacaggctccacagaggtgggcaagcacatcatgaaaagctgtgccataagtaacgtgaagaaggtgtccctggaactgggcgggaagtcacccctcatcatctttgctgactgtgacctcaacaaggctgtgcagatggggatgagttctgttttcttcaacaaaggagagaattgcattgcagcaggccgactctttgtggaggactccattcatgatgagttcgtgcggagagtggtagaagaggtgcggaagatgaaggtgggcaacccgctggacagggacaccgaccacgggccgcagaatcaccatgcccaccttgtgaagctgatggagtactgccagcatggcgtgaaggaaggggccacactggtctgcggcgggaatcaggtccctcggccagggttcttctttgagccaactgttttcacagacgtggaagaccacatgttcatagccaaggaggagtccttcgggcctgtcatgatcatctctcggtttgctgatggggacttggatgccgtgctgtctcgggccaatgccacggaatttggcctggcttctggtgtcttcaccagggacatcaacaaggccctgtatgtcagtgacaagctccaggcaggcactgtgtttgtcaacacgtacaacaagaccgacgtggccgctcccttcggaggattcaaacagtctggatttggcaaagatctaggagaggcggctctgaacgagtacctgcgggtcaagacagtgaccttcgaatactgaagaaaggtctttgtgagaagaaagtccctgcccctccctcgtggctggggccccctccctcttgagcctgggtgcacagcacctcccacctggggggctagtggaagccctcctgcctgcacaccatgtctgcatcttggacgccctctgtccagtcagaagcagcccttggctgggtgaggtgtgcccctcccagggagaataaagcttctgaagagagacgaaaaaaaaaaaaaaa

SEQ ID NO: 40 - DNA, 2849 bp, Homo sapiens
  source 1..2849: mol_type = genomic DNA
ctcctggctcccaggacgggtctgcaccaacctcagtttcggggctgcggctcacagaagtctaacctgcccgggacgcccgcaccaactcctgcgcgcggtccttccaaccctcctgctaccatgaagattgcagtgattggacagagcctgtttggccaggaagtttactgccacctgaggaaggagggccacgaagtggtgggtgtgttcactgttccagacaaggatggaaaggccgaccccctgggtctggaagctgagaaggatggagtgccggtattcaagtactcccggtggcgtgcaaaaggacaggctttgcctgatgtggtggcaaaataccaggctttgggggccgagctcaacgtcctgcccttctgcagccaattcatccccatggagataatcagtgccccccggcatggctccatcatctatcacccgtcactgctccctaggcaccgaggggcctcggccatcaactggaccctcattcacggagataagaaaggggggttttccatcttctgggcggatgatggtctggacaccggagacctgctgctgcagaaggagtgtgaggtgctcccggacgacaccgtgagcacgctgtacaaccgcttcctcttccctgaaggcatcaaagggatggtgcaggccgtgaggctgatcgctgagggcaaagcccccagactccctcagcctgaggaaggagccacctatgaggggattcagaagaaggagacagccaagatcaactgggaccagccggcagaggccattcacaactggatccgcgggaacgacaaggtgccgggagcctggacagaggcctgtgaacagaaactgacatttttcaactcaacgctgaacacttcaggcctggtgcccgagggagacgctttgcccatcccaggagcccatcggccaggggtggtcaccaaagcaggactcatcctctttgggaatgatgacaaaatgctgctggtgaagaatattcagctggaggatggcaaaatgatcctggcctcgaacttctttaagggggcagccagcagtgtccttgagctgacagaggcagagctggttactgcggaggctgtgcggagtgtttggcagcggatcctccccaaagtcctggaggttgaagactccactgatttcttcaagtcaggggccgcgtctgtggacgttgtgaggctggtggaggaagtgaaggagctgtgtgatggcctggagttagaaaatgaagatgtgtacatggcatccacctttggggacttcatccagctgttagtgaggaagctgcgaggggacgatgaggagggcgagtgcagcattgactacgtggaaatggcagtgaacaagcgcactgtccgcatgccccaccagctcttcattgggggggagttcgtggatgccgagggcgccaagacctctgagaccatcaatcccaccgatggaagtgtcatctgccaggtatccctggcccaagtcaccgacgtcgacaaggcagtggccgcagccaaggatgcctttgagaatggacggtgggggaagatcagtgcgcgggaccggggccggctgatgtacagggctccaccatccccatcaaccaggccagacccaaccgcaacctgaccttgaccaggaaggagcctgttggggtttgtggcatcatcatcccctggaactatcccctgatgatgctgtcctggaagacagctgcctgcctggctgccgggaacacagtggtgatcaagcctgctcaggtgaccccactcacagccttgaagtttgcagagctgacattaaaggccggcattcccaaaggtgtggttaacgtcctcccaggatctggctccctggtcggccagagactctcagaccatcctgatgtgaggaaaatcgggttcacaggctccacagaggtgggcaagcacatcatgaaaaggggatgagttctgttttcttcaacaaaggagagaattgcattgcagcaggccgactctttgtggaggactccattcatgatgagttcgtgcggagagtggtagaagaggtgcggaagatgaaggtgggcaacccgctggacagggacaccgaccacgggccgcagaatcaccatgcccaccttgtgaagctgatggagtactgccagcatggcgtgaaggaaggggccacactggtctgcggcgggaatcaggtccctcggccagggttcttctttgagccaactgttttcacagacgtggaagaccacatgttcatagccaaggaggagtccttcgggcctgtcatgatcatctctcggtttgctgatggggacttggatgccgtgctgtctcgggccaatgccacggaatttggcctggcttctggtgtcttcaccagggacatcaacaaggccctgtatgtcagtgacaagctccaggcaggcactgtgtttgtcaacacgtacaacaagaccgacgtggccgctcccttcggaggattcaaacagtctggatttggcaaagatctaggagaggcggctctgaacgagtacctgcgggtcaagacagtgaccttcgaatactgaagaaaggtctttgtgagaagaaagtccctgcccctccctcgtggctggggccccctccctcttgagcctgggtgcacagcacctcccacctggggggctagtggaagccctcctgcctgcacaccatgtctgcatcttggacgccctctgtccagtcagaagcagcccttggctgggtgaggtgtgcccctcccagggagaataaagcttctgaagagaaaaaaaaaaaaaaaaaaaaaaaaaaaaaaaaaaaaaaaaaaaaaaaaaa

SEQ ID NO: 41 - DNA, 3647 bp, Homo sapiens
  source 1..3647: mol_type = genomic DNA
taaaaaaaaaaaaaaagaagagcaaagcagagctctgagcagcttcctgccccagcatccctggttctgctgctttcttcttcccaggcagccgtgtcacacagacctgcagctgagatgggtgccatctccctgggttgcttctgcagaggaggcctctcctccccagtggagcctcctacctgccggctattgactgagtgtccagctgaggacagcatccctgcagtgcatttcttgcccactgatgtgatgtgttcatgactcccagcctctctgtttgctctgccactaatacaaggaggtgccccagcctctgggcccctgcagctgtgccagcggatggtgctgttttgtattccttaatttgtgcagcaccagctgcgtgcaggcactgtgcttggcaccggggctgtaataggacccagacagatgcgtgcctgccctggccaggctcatgctctgcaggtggggtcagaggtcaacatgcagtagaggaaaggacagcagatggggtgcacaggcaggctgtggttttatacggggcgatcagggaggcaccccagagaagggaacacaggcctgcaggaaatgaggtgtggagtgggcagcaggaagggcagtccagggggcagtggggcacaggcctggtgtgtacaggccagaaaggaaaggcaggtggccgtgtgaagccgcaaggggtgggggggagtggggaggcactggccgggtcttgcttcttgcagcaaagcatgctttgggcctacccaggtccctgccacctggggtcccaatgcccctacctgccctggagggaccggccccaccagccctctgttccttgcagctgtgccataagtaacgtgaagaaggtgtccctggaactgggcgggaagtcacccctcatcatctttgctgactgtgacctcaacaaggctgtgcagatggggatgagttctgttttcttcaacaaaggagagaattgcattgcagcaggccgactctttgtggaggactccattcatgatgagttcgtgcggagagtggtagaagaggtgcggaagatgaaggtgggcaacccgctggacagggacaccgaccacgggccgcagaatcaccatgcccaccttgtgaagctgatggagtactgccagcatggcgtgaaggaaggggccacactggtctgcggcgggaatcaggtccctcggccagggttcttctttgagccaactgttttcacagacgtggaagaccacatgttcatagccaaggaggagtccttcgggcctgtcatgatcatctctcggtttgctgatggggacttggatgccgtgctgtctcgggccaatgccacggaatttggcctggcttctggtgtcttcaccagggacatcaacaaggccctgtatgtcagtgacaagctccaggcaggcactgtgtttgtcaacacgtacaacaagaccgacgtggccgctcccttcggaggattcgaacagtctggatttggcaaagatctaggtaacctactcctgcctgtggggttgctttcatttattcattcaacaaacatctgttcaaaaccacttagggccaggtcctatctcagatgcagggacgtagccttgaacatgatggctgtcagggttcgcttcttactgggagggaacttgtgacaagtccgtgagcaagatgcttgcagaggggtgtcgtgctgggaagaaggcaagaagaggggcctggaggagacactcccgccaggaggcactgggggcctctctggtgtggtggcacctgtgctacccagacctgcatagcagggaggagttggccgtgaagacccaggggcccgtgtttctggctgagggttcagcaggtccttgggggaaccagctttggtcgtggagctgcagagaggccagagtggtgggagtgggccaagggggagcaggagggaggagagagggcctgagaggcaggtaggggccagattgaaggcccatgggccatggtcaggggctcaggttgcatccttagtgtaaagaggagccatgggaccaaatgtacccccgggtgaacaccacgggtgttgcaagtctcccagtagaggtgaagttactcaggcggcagcaggcggggtcccccggcacacagcacaggctccccagtgctctgcctgctgggtggcgtggagttctgctccggccctctctccctgggctgctccaagccttgggcctcgtcctgctctctcagcaggggggactagacaggtctgatgggcaagcttggcaggggtggctggcaaggtccggggaagccatatgctgtctcagaggtcccacctgtctctccgggctcctgtgccagcccggagaccacagggaaggtcatgctgaggctgggggtcaaaggctggtcactgtttccagttttctctcctccccctgcccccatctttcaagccctgcagaagcccccaagggtacccatgagaggggcccatgtgtgcccacagggctggactcacatgcacgcatgtgtaggctggacactcctgcttcctctgtccctgtcggcctcctcttcctgccttctcccaggccaccttcctggtgtccaccaggggaatccatggggcccatggccacccagggaaggctgtggctgccaagtccccaggacgtgatctgggccccttatgaatcctgcccgagttcccccagctccctcctaaccctagtccccatgtcctgctgagaggaccagcaccctcctgggacaggcccacaagccaagccttccaagcagcctgcctgggcagactcaggacctcagagggacggggcagtgccactcctggggccagccagagctgctggggagctgtcaggcagccccaggcctcacacttgtcatggggctgagatgcaccagccacatggcactgccaaggcctggggcctcagggccctgtgaggcatccccttttcccagccacagcttgatgcagacgtggctgggggcagccatgagagaagagatgggccagtgagtctgggcagtaacgccaagtctctccacccccttccacctgaaggggcttcccactgtccagacaaggcggtgggagctggggaagattcttaaatggctgcctcagattggctttgtattctggggagtcctggcccgctatccactgccagggataacctgggtaagattcatgacctcgctgggcctcgacttctcacctggaagtggggtgagccagagctgcccccacgtggttgctgaggaataagacacttgcagccccgagcagtgccctgcctgtggtgggagctgctgtgacctttgtggtgtcttacaggagaggcggctctgaacgagtacctgcgggtcaagacagtgaccttcgaatactgaagaaaggtctttgtgagaagaaagtccctgcccctccctcgtggctggggccccctccctcttgagcctgggtgcacagcacctcccacctggggggctagtggaagccctcctgcctgcacaccatgtctgcatcttggacgccctctgtccagtcaggagcagcccttggctgggtgaggtgtgcccctcccagggagaataaagcttctgaagag

SEQ ID NO: 42 - DNA, 3084 bp, Homo sapiens
  source 1..3084: mol_type = genomic DNA
ccagagctcgcggactggcggggacaggtcccacctcctggctcccaggacgggtctgcaccaacctcagtttcggggctgcggctcacagaagtctaacctgcccgggacgcccgcaccaactcctgcgcgcggtccttccaaccctcctgctaccatgaagattgcagtgattggacagagcctgtttggccaggaagtttactgccacctgaggaaggagggccacgaagtggtgggtgtgttcactgttccagacaaggatggaaaggccgaccccctgggtctggaagctgagaaggatggagtgccggtattcaagtactcccggtggcgtgcaaaaggacaggctttgcctgatgtggtggcaaaataccaggctttgggggccgagctcaacgtcctgcccttctgcagccaattcatccccatggagataatcagtgccccccggcatggctccatcatctatcacccgtcactgctccctaggcaccgaggggcctcggccatcaactggaccctcattcacggagataagaaaggggggttttccatcttctgggcggatgatggtctggacaccggagacctgctgctgcagaaggagtgtgaggtgctcccggacgacaccgtgagcacgctgtacaaccgcttcctcttccctgaaggcatcaaagggatggtgcaggccgtgaggctgatcgctgagggcaaagcccccagactccctcagcctgaggaaggagccacctatgaggggattcagaagaaggagacagccaagatcaactgggaccagccggcagaggccattcacaactggatccgcgggaacgacaaggtgccgggagcctggacagaggcctgtgaacagaaactgacatttttcaactcaacgctgaacacttcaggcctggtgcccgagggagacgctttgcccatcccaggagcccatcggccaggggtggtcaccaaagcaggactcatcctctttgggaatgatgacaaaatgctgctggtgaagaatattcagctggaggatggcaaaatgatcctggcctcgaacttctttaagggggcagccagcagtgtccttgagctgacagaggcagagctggttactgcggaggctgtgcggagtgtttggcagcggatcctccccaaagtcctggaggttgaagactccactgatttcttcaagtcaggggccgcgtctgtggacgttgtgaggctggtggaggaagtgaaggagctgtgtgatggcctggagttagaaaatgaagatgtgtacatggcatccacctttggggacttcatccagctgttagtgaggaagctgcgaggggacgatgaggagggcgagtgcagcattgactacgtggaaatggcagtgaacaagcgcactgtccgcatgccccaccagctcttcattgggggggagttcgtggatgccgagggcgccaagacctctgagaccatcaatcccaccgatggaagtgtcatctgccaggtatccctggcccaagtcaccgacgtcgacaaggcagtggccgcagccaaggatgcctttgagaatggacggtgggggaagatcagtgcgcgggaccggggccggctgatgtacaggttggcagatctcatggagcagcaccaggaggagctggccaccattgaggccctggatgcgggtgccgtctacacgctggccctgaagacccacgtgggcatgtccatccagaccttccgctactttgctggctggtgtgacaagatccagggctccaccatccccatcaaccaggccagacccaaccgcaacctgaccttgaccaggaaggagcctgttggggtttgtggcatcatcatcccctggaactatcccctgatgatgctgtcctggaagacagctgcctgcctggctgccgggaacacagtggtgatcaagcctgctcaggtgaccccactcacagccttgaagtttgcagagctgacattaaaggccggcattcccaaaggtgtggttaacgtcctcccaggatctggctccctggtcggccagagactctcagaccatcctgatgtgaggaaaatcgggttcacaggctccacagaggtgggcaagcacatcatgaaaagctgtgccataagtaacgtgaagaaggtgtccctggaactgggcgggaagtcacccctcatcatctttgctgactgtgacctcaacaaggctgtgcagatggggatgagttctgttttcttcaacaaaggagagaattgcattgcagcaggccgactctttgtggaggactccattcatgatgagttcgtgcggagagtggtagaagaggtgcggaagatgaaggtgggcaacccgctggacagggacaccgaccacgggccgcagaatcaccatgcccaccttgtgaagctgatggagtactgccagcatggcgtgaaggaaggggccacactggtctgcggcgggaatcaggtccctcggccagggttcttctttgagccaactgttttcacaggcgtggaagaccacatgttcatagccaaggaggagtccttcgggcctgtcatgatcatctctcggtttgctgatggggacttggatgccgtgctgtctcgggccaatgccacggaatttggcctggcttctggtgtcttcaccagggacatcaacaaggccctgtatgtcagtgacaagctccaggcaggcactgtgtttgtcaacacgtacaacaagaccgacgtggccgctcccttcggaggattcaaacagtctggatttggcaaagatctaggagaggcggctctgaacgagtacctgcgggtcaagacagtgaccttcgaatactgaagaaaggtctttgtgagaagaaagtccctgcccctccctcgtggctggggccccctccctcttgagcctgggtgcacagcacctcccacctggggggctagtggaagccctcctgcctgcacaccatgtctgcatcttggacgccctctgtccagtcagaagcagcccttggctgggtgaggtgtgcccctcccagggagaataaagcttctgaagag

SEQ ID NO: 43 - DNA, 3040 bp, Homo sapiens
  misc_feature 1511: note = n is a, c, g, or t
  misc_feature 2864: note = n is a, c, g, or t
  misc_feature 2949: note = n is a, c, g, or t
  source 1..3040: mol_type = genomic DNA
gacgggtctgcaccaacctcagtttcggggctgcggctcacagaagtctaacctgcccgggacgcccgcaccaactcctgccgcgcggtccttccaaccctcctgctaccatgaagattgcagtgattggacagagcctgtttggccaggaagtttactgccacctgaggaaggagggccacgaagtggtgggtgtgttcactgttccagacaaggatggaaaggccgaccccctgggtctggaagctgagaaggatggagtgccggtattcaagtactcccggtggcgtgcaaaagcgcaagctttgcctgatgtggtggcaaaataccaggctttgggggccgaactcaacgtcctgccctcctgcagccaattcatccccatggagataatcagtgccccccggcatggctccatcatctatcacccgtcactgctccctaggcaccgaggggcctcggccatcaactggaccctcattcacggagataagaaaggggggttttccatcttctgggcggatgatggtctggacaccggagacctgctgctgcagaaggagtgtgaggtgctcccggacgacaccgtgagcacgctgtacaaccgcttcctcttccctgaaggcatcaaaggggtggtgcaggccgtgaggctgatcgctgagggcaaagcccccagactccctcagcctaaggaaggagccacctatgaggggattcagaagaaggagacagccaagatcaactgggaccagccggcagaggccattcacaactggatccgcgggaacgacaaggtgccgggagcctggacagaggcctgtgaacagaaactgacatttttcaactcaacgctgaacacttcaggcctggtgcccgagggagacgctttgcccatcccaggagcccatcggccaggggtggtcaccaaagcaggactcatcctctttgggaatgatgacaaaatgctgctggtgaagaatattcagctggaggatggcaaaatgatcctggcctcgaacttctttaagggggcagccagcagtgtccttgagctgacagaggcagagctggttactgcggaggctgtgcggagtgtttggcagcggatcctccccaaagtactggaggttgaagactccactgatttcttcaagtcaggggccgcgtctgtggacgttgtgaggctggtggaggaagtgaaggagctgtgtgatggcctggagttagaaaatgaagatgtgtacatggcatccacctttggggacttcatccagctgttagtgaggaagctgcgaggggacgatgaggagggcgagtgcagcattgactacgtggaaatggcagtgaacaagcgcactgtccgcatgccccaccagctcttcattgggggggagttcgtggatgccgagggcgccaagacctctgagaccatcaatcccaccgatggaagtgtcatctgccaggtatccctggcccaagtcaccgacgtcgacaaggcagtggccgcngccaagggtgcctttgagaatggacggtgggggaagatcagtgcgcgggaccggggccggctgatgtacaggttggcagatctcatggagcagcaccaggaggagctggccaccattgaggccctggatgcgggtgccgtctacacgctggccctgaagacccacgtgggcatgtccatccagaccttccgatactttgctggctggtgtgacaagatccagggctccaccatccccatcaaccaggccagacccaaccgcaacctgaccttgaccaggaaggagcctgttggggtttgtggcatcatcatcccctggaactatcccctgatgatgctgtcctggaagacagctgcctgcctggctgccgggaacacagtggtgatcaagcctgctcaggtgaccccactcacagccttgaagtttgcagagctgacattaaaggccgggattcccaaaggtgtggtcaacgtcctcccaggatctggctccctggtcggccagagactctcagaccatcctgatgtgaggaaaatcgggttcacaggctccacagaggtgggcaagcacatcatgaaaagctgtgccataagtaacgtgaagaaggtgtccctggaactgggcggggagtcacccttcatcatctttgctgactgtgacctcaacaaggctgtgcagatggggatgagttctgttttcttcagcaaaggagagaattgcattgcagcaggccgactctttgtggaggactccattcatgatgagttcgtgcggagagtggtagaagaggtgcggaagatgaaggtgggcaacccgctggacagggacaccgaccacgggccgcagaatcaccatgcccaccttgtgaagctgatggagtactgccagcatggcgtgaaggaaggggccacactggtctgcggcgggaatcaggtccctcggccagggttcttctttgagccaactgttttcacagacgtggaagaccacatgttcatagccaaggaggagtccttcgggcctgtcatgatcatctctcggtttgctgatggggacttggatgccgtgctgtctcgggccaatgccacggaatttggcctggcttctggtgtcttcaccagggacatcaacaaggccctgtatgtcagtgacaagctccaggcaggcactgtgtttgtcaacacgtacaacaagaccgacgtggccgctcccttcggaggattcaaacagtctggatttggcaaagatctaggagaggcggctctgaacgagtacctgcgggtcaagacagtgaccttcgaatactgaagaaaggtctgtgtgagaagaaagtccctgcccctccctcgtggntggggccccctccctcttgagcctgggtgcacagcacctcccacctggggggctagtggaagccctcctgcctgcacaccatgtntgcatcttggacgccctctgtccagtcagaagcagcccttggctgggtgaggtgtgcccctcccagggagaataaagcttctgaagataaa

SEQ ID NO: 44 - DNA, 3043 bp, Homo sapiens
  source 1..3043: mol_type = genomic DNA
aggtcccacctcctggctcccaggacgggtctgcaccaacctcagtttcggggctgcggctcacagaagtctaacctgcccgggacgcccgcaccaactcctgcgcgcggtccttccaaccctcctgctaccatgaagattgcagtgattggacagagcctgtttggccaggaagtttactgccacctgaggaaggagggccacgaagtggtgggtgtgttcactgttccagacaaggatggaaaggccgaccccctgggtctggaagctgagaaggatggagtgccggtattcaagtactcccggtggcgtgcaaaaggacaggctttgcctgatgtggtggcaaaataccaggctttgggggccgagctcaacgtcctgcccttctgcagccaattcatccccatggagataatcagtgccccccggcatggctccatcatctatcacccgtcactgctccctaggcaccgaggggcctcggccatcaactggaccctcattcacggagataagaaaggggggttttccatcttctgggcggatgatggtctggacaccggagacctgctgctgcagaaggagtgtgaggtgctcccggacgacaccgtgagcacgctgtacaaccgcttcctcttccctgaaggcatcaaagggatggtgcaggccgtgaggctgatcgctgagggcaaagcccccagactccctcagcctgaggaaggagccacctatgaggggattcagaagaaggagacagccaagatcaactgggaccagccggcagaggccattcacaactggatccgcgggaacgacaaggtgccgggagcctggacagaggcctgtgaacagaaactgacatttttcaactcaacgctgaacacttcaggcctggtgcccgagggagacgctttgcccatcccaggagcccatcggccaggggtggtcaccaaagcaggactcatcctctttgggaatgatgacaaaatgctgctggtgaagaatattcagctggaggatggcaaaatgatcctggcctcgaacttctttaagggggcagccagcggtgtccttgagctgacagaggcagagctggttactgcggaggctgtgcggagtttttggcagcggatcctccccaaagtcctggaggttgaagactccactgatttcttcaagtcaggggccgcgtctgtggacgttgtgaggctggtggaggaagtgaaggagctgtgtgatggcctggagttagaaaatgaagatgtgtacatggcatccacctttggggacttcatccagctgttagtgaggaagcttcgaggggacgatgaggagggcgagtgcagcattgactacgtggaaatggcagtgaacaagcgcactgtccgcatgccccaccagctcttcattgggggggagttcgtggatgccgagggcgccaagacctctgagaccatcaatcccaccgatggaagtgtcatctgccaggtatccctggcccaagtcaccgacgtcgacaaggcagtggccgcagccaaggatgcctttgagaatggacggtgggggaagatcggtgcgcgggaccggggccggctgatgtacaggttggcagatctcatggagcagcaccaggaggagctggccaccattgaggccctggatgcgggtgccgtctacacgctggccctgaagacccacgtgggcatgtccatccagaccttccgctactttgctggctggtgtgacaagatccagggctccaccatccccatcaaccaggccagacccaaccgcaacctgaccttgaccaggaaggagcctgttggggtttgtggcatcatcatcccctggaactatcccctgatgatgctgtcctggaagacagctgcctgcctggctgccgggaacacagtggtgatcaagcctgctcaggtgaccccactcacagccttgaagtttgcagagctgacattaaaggccggcattcccaaaggtgtggttaacgtcctcccaggatctggctccctggtcggccagagactctcagaccatcctgatgtgaggaaaatcgggttcacaggctccacagaggtgggcaagcacatcatgaaaagctgtgccataagtaacgtgaagaaggtgtccctggaactgggcgggaagtcacccctcatcatctttgctgactgtgacctcaacaaggctgtgcagatggggatgagttctgttttcttcaacaaaggagagaattgcattgcagcaggccgactctttgtggaggactccattcatgatgagttcgtgcggagagtggtagaagaggtgcggaagatgaaggtgggcaacccgctggacagggacaccgaccacgggccgcagaatcaccatgcccaccttgtgaagctgatggagtactgccagcatggcgtgaaggaaggggccacactggtctgcggcgggaatcaggtccctcggccagggttcttctttgagccaactgttttcacagacgtggaagaccacatgttcatagccaaggaggagtccttcgggcctgtcatgatcatctctcggtttgctgatggggacttggatgccgtgctgtctcgggccaatgccacggaatttggcctggcttctggtgtcttcaccagggacgtcaacaaggccctgtatgtcagtgacaagctccaggcaggcactgtgtttgtcaacacgtacaacaagaccgacgtggccgctcccttcggaggattcaaacagtctggatttggcaaagatctaggagaggcggctctgaacgagtacctgcgggtcaagacagtgaccttcgaatactgaagaaaggtctttgtgagaagaaagtccctgcccctccctcgtggctggggccccctccctcttgagcctgggtgcacagcacctcccacctggggggctagtggaagccctcctgcctgcacaccatgtctgcatcttggacgccctctgtccagtcagaagcagcccttggctgggtgaggtgtgcccctcccagggagaa

SEQ ID NO: 45 - DNA, 1515 bp, Homo sapiens
  source 1..1515: mol_type = genomic DNA
atgaagattgcagtgattggacagagcctgtttggccaggaagtttactgccacctgaggaaggagggccacgaagtggtgggtgtgttcactgttccagacaaggatggaaaggccgaccccctgggtctggaagctgagaaggatggagtgccggtattcaagtactcccggtggcgtgcaaaaggacaggctttgcctgatgtggtggcaaaataccaggctttgggggccgagctcaacgtcctgcccttctgcagccaattcatccccatggagataatcagtgccccccggcatggctccatcatctatcacccgtcactgctccctaggcaccgaggggcctcggccatcaactggaccctcattcacggagataagaaaggggggttttccatcttctgggcggatgatggtctggacaccggagacctgctgctgcagaaggagtgtgaggtgctcccggacgacaccgtgagcacgctgtacaaccgcttcctcttccctgaaggcatcaaagggatggtgcaggccgtgaggctgatcgctgagggcaaagcccccagactccctcagcctgaggaaggagccacctatgaggggattcagaagaaggagacagccaagatcaactgggaccagccggcagaggccattcacaactggatccgcgggaacgacaaggtgccgggagcctggacagaggcctgtgaacagaaactgacatttttcaactcaacgctgaacacttcaggcctggtgcccgagggagacgctttgcccatcccaggagcccatcggccaggggtggtcaccaaagcaggactcatcctctttgggaatgatgacaaaatgctgctggtgaagaatattcagctggaggatggcaaaatgatcctggcctcgaacttctttaagggggcagccagcagtgtccttgagctgacagaggcagagctggttactgcggaggctgtgcggagtgtttggcagcggatcctccccaaagtcctggaggttgaagactccactgatttcttcaagtcaggggccgcgtctgtggacgttgtgaggctggtggaggaagtgaaggagctgtgtgatggcctggagttagaaaatgaagatgtgtacatggcatccacctttggggacttcatccagctgttagtgaggaagctgcgaggggacgatgaggagggcgagtgcagcattgactacgtggaaatggcagtgaacaagcgcactgtccgcatgccccaccagctcttcattgggggggagttcgtggatgccgagggcgccaagacctctgagaccatcaatcccaccgatggaagtgtcatctgccaggtatccctggcccaagtcaccgacgtcgacaaggcagtggccgcagccaaggatgcctttgagaatggacggtgggggaagatcagtgcgcgggaccggggccggctgatgtacagggctccaccatccccatcaaccaggccagacccaaccgcaacc

SEQ ID NO: 46 - DNA, 1666 bp, Homo sapiens
  source 1..1666: mol_type = genomic DNA
atgaagattgcagtgattggacagagcctgtttggccaggaagtttactgccacctgaggaaggagggccacgaagtggtgggtgtgttcactgttccagacaaggatggaaaggccgaccccctgggtctggaagctgagaaggatggagtgccggtattcaagtactcccggtggcgtgcaaaaggacaggctttgcctgatgtggtggcaaaataccaggctttgggggccgagctcaacgtcctgcccttctgcagccaattcatccccatggagataatcagtgccccccggcatggctccatcatctatcacccgtcactgctccctaggcaccgaggggcctcggccatcaactggaccctcattcacggagataagaaaggggggttttccatcttctgggcggatgatggtctggacaccggagacctgctgctgcagaaggagtgtgaggtgctcccggacgacaccgtgagcacgctgtacaaccgcttcctcttccctgaaggcatcaaagggatggtgcaggccgtgaggctgatcgctgagggcaaagcccccagactccctcagcctgaggaaggagccacctatgaggggattcagaagaaggagacagccaagatcaactgggaccagccggcagaggccattcacaactggatccgcgggaacgacaaggtgccgggagcctggacagaggcctgtgaacagaaactgacatttttcaactcaacgctgaacacttcaggcctggtgcccgagggagacgctttgcccatcccaggagcccatcggccaggggtggtcaccaaagcaggactcatcctctttgggaatgatgacaaaatgctgctggtgaagaatattcagctggaggatggcaaaatgatcctggcctcgaacttctttaagggggcagccagcagtgtccttgagctgacagaggcagagctggttactgcggaggctgtgcggagtgtttggcagcggatcctccccaaagtcctggaggttgaagactccactgatttcttcaagtcaggggccgcgtctgtggacgttgtgaggctggtggaggaagtgaaggagctgtgtgatggcctggagttagaaaatgaagatgtgtacatggcatccacctttggggacttcatccagctgttagtgaggaagctgcgaggggacgatgaggagggcgagtgcagcattgactacgtggaaatggcagtgaacaagcgcactgtccgcatgccccaccagctcttcattgggggggagttcgtggatgccgagggcgccaagacctctgagaccatcaatcccaccgatggaagtgtcatctgccaggtatccctggcccaagtcaccgacgtcgacaaggcagtggccgcagccaaggatgcctttgagaatggacggtgggggaagatcagtgcgcgggaccggggccggctgatgtacaggttggcagatctcatggagcagcaccaggaggagctggccaccattgaggccctggatgcgggtgccgtctacacgctggccctgaagacccacgtgggcatgtccatccagaccttccgctactttgctggctggtgtgacaagatccagggctccaccatccccatcaaccaggccagacccaaccgcaacc

SEQ ID NO: 47 - DNA, 2961 bp, Homo sapiens
  source 1..2961: mol_type = genomic DNA
agataatcagtgccccccggcatggctccatcatctatcacccgtcactgctccctaggcaccgaggggcctcggccatcaactggaccctcattcacggagataagaaaggggggttttccatcttctgggcggatgatggtctggacaccggagacctgctgctgcagaaggagtgtgaggtgctcccggacgacaccgtgagcacgctgtacaaccgcttcctcttccctgaaggcatcaaagggatggccgtgaggctgatcgctgagggcaaagcccccagactccctcagcctgaggaaggagccacctatgaggggattcagaagaaggagacagccaagatcaactgggaccagccggcagaggccattcacaactggatccgcgggaacgacaaggtgccgggagcctggacagaggcctgtgaacagaaactgacatttttcaactcaacgctgaacacttcaggcctggtgcccgagggagacgctttgcccatcccaggagcccatcggccaggggtggtcaccaaagcaggactcatcctctttgggaatgatgacaaaatggtaagggcacggctgtgggtcacttgcctgctcaaagccacccatgctcctgtccttggactcaggcctcacaggaagaccctaggctcctctggagaaaatggaaaaaaccagacccaggaaggaacactgaccctgatttgtccctgaccacccggctggtcctgagcacagggtgtccgaggcagtttacccacttctctgttctgggaaagctgggctccctacccttcctggctaggcacccatctccaggctgagtgccctgtgtgggtgtcaggcaacctagaatcagagagaagccctcccagggagcctgggttcagggcctctctttggtctatcagaaacacctctgggtgtggggtcattaagcctctgtgcctcagctcccatctctttgaacggcgatgccatggtaacttagcacgtgcagagccttgggagccatgccggccacctgctcttgttattagcagactacaactcacggtaccagcaaacactgatggagcaccttttataccagaacaatgtatatgcgttaaatttaatctgcctaacaacactatgagatatgtataaatattatatccttatagaggaaaaaaacagagatttaaataacttgtccaggatcatccaagctagcccgtggcagagctgggattcagactctgaaattctggctccaaagccgtgatgctggtcttggccatggtagcttcctgttcatatgcactctactactccttctcacatgagcagccgggggtagggagagggcaggcagggatcttcccacacactgacagggtccggacaaaccccatgggtgtggtacccccagccgtgttgctgtgtccggcctaccagagtgaggcgtggcagtatggggcctggcctttgctcgctcttggtgtccagtctgccatgctcccctgtcagaaggtctaggctgctgttgatgtctgcaatgtagtgttttgggtatccaagattgatatatgcagttgcaagagaatatctgtctgtggtcaggttccctagaagcagcatctaaggtaaaaattcttgtgcaagtgatttattgagggaatgttccagaaaatcatgcgaggcagtaagggcagaggaaagcaaagcaaaagtaaaggttcaggagaaatctagcctggggctgctcccagggtgggttttggagtattaactgcaccctccaattatacctgcctgtccccacctctgtcagcctttggtttcagtggcccctggggtggggtggaggacccaccaggcataatccctcggcctctttgtgtacaggagctcttatccatccacagcaagcaaggatgggacagtgcaggccgttatcatccagcccttgctgcagctggaggacagggcaccagccacaggggtctgagcagggcacccacagcatctgtccagagacctgcaaagacaggaatgcaaagaaggcaattaagtgtcttaagaggaagctggggttatcagctctctcacaagagctttgtccactgtccagaggtggtcagggtgggaggggagtgaggagagaccagctgagcacacacaccctgctccccacagatcaacccagaagaccctgggttgaagcatctctcagccacgccctgtggagtctggctgggctttagcttgcagaaagctccagaacatctttgaaaggcaatggggcgagggtcaggccgagaggcaagttccagttctggcagagcatgcatacagagtaccattcttacacagccactcttaacgcacagtgacatgcacccacccatgagcttatccataactctttttgtacatgtgttttttttcctggcccctaacaaaagcatttgttgaaaaactattgataaacaagcaggccccaaacaattcaaacatcttattaaatacagtaaatctgaggcagacactagagtagcccagagtcatgagctacaatgggggcagttcatgtctggcagccagaatccccttgaactgatggctggacgcaggctctacctgggaccagcttgaagtgctatcctgaagctgcagactgcagggccggccagaccctttttcagcctctcctcttcccacctctgtatcccacacaggcatctggtgatgttctccaggtgtttctgtggcagttctgggagctactgggtgattgcaagattagtttttttttctaagttgactttctatgtggtgcctgaatgacgttttctttttttgttcagtaggaatccttttttatagaagtaataaagtcattacacttaaaaaaaaaaaaaaaaaaaaaaaaaaaaaaaaaaaaaaaaaaaaaaaggggcggccg

SEQ ID NO: 48 - DNA, 1010 bp, Homo sapiens
  source 1..1010: mol_type = genomic DNA
acaggtcccacctcctggctcccaggacgggtctgcaccaacctcagtttcggggctgcggctcacagaagtctaacctgcccgggacgcccgcaccaactcctgcgcgcggtccttccaaccctcctgctaccatgaagattgcagtgattggacagagcctgtttggccaggaagtttactgccacctgaggaaggagggccacgaagtggtgggtgtgttcactgttccagacaaggatggaaaggccgaccccctgggaccctcattcacggagataagaaaggggggttttccatcttctgggcggatgatggtctggacaccggagacctgctgctgcagaaggagtgtgaggtgctcccggacgacaccgtgagcacgctgtacaaccgcttcctcttccctgaaggcatcaaagggatggtgcaggccgtgaggctgatcgctgagggcaaagcccccagactccctcagcctgaggaaggagccacctatgaggggattcagaagaaggagacagccaagatcaactgggaccagccggcagaggccattcacaactggatccgcgggaacgacaaggtgccgggagcctggacagaggcctgtgaacagaaactgacatttttcaactcaacgctgaacacttcaggcctggtgcccgagggagacgctttgcccatcccaggagcccatcggccaggggtggtcaccaaagcaggactcatcctctttgggaatgatgacaaaatggtaagggcacggctgtgggtcacttgcctgctcaaagccacccatgctcctgtccttggactcaggcctcacaggaagaccctaggctcctctggagaaaatggaaaaaaccagacccaggaaggaacactgaccctgatttgtccctgaccacccggctggtcctgagcacagggtgtccgaggcagtttacccacttctctgttctggggaagctgggctccctacccttcctggctaggcacccatctcc

SEQ ID NO: 49 - DNA, 789 bp, Homo sapiens
  source 1..789: mol_type = genomic DNA
tttgtgaatcgttgattgctcaattaaacttttttaaatttaatttggctgaagtttttcttttaacatggtgtcagaagcgggatccaaagtacagcttctagcgacccccaggagtactgagtgaacaagcaaggtccttccaaccctcctgctaccatgaagattgcagtgattggacagagcctgtttggccaggaagtttactgccacctgaggaaggagggccacgaagtggtgggtgtgttcactgttccagacaaggatggaaaggccgaccccctgggtctggaagctgagaaggatggagtgccggtattcaagtactcccggtggcgtgcaaaaggacaggctttgcctgatgtggtggcaaaataccaggctttgggggccgagctcaacgtcctgcccttctgcagccaattcatccccatggagataatcagtgccccccggcatggctccatcatctatcacccgtcactgctccctaggcaccgaggggcctcggccatcaactggaccctcattcacggagataagaaaggggggttttccatcttctgggcggatgatggtctggacaccggagacctgctgctgcagaaggagtgtgaggtgctcccggacgacaccgtgagcacgctgtacaaccgcttcctcttccctgaaggcatcaaagggatggtgcaggccgtgaggctgatcgctgagggcaaagcccccagactccctcagcctgaggaaggagccacctatgaggggattcagaagaaggagacagccaag

SEQ ID NO: 50 - DNA, 3277 bp, Homo sapiens
  source 1..3277: mol_type = genomic DNA
acagtaagtcttcttgacctaagcgggaaagagcgcaggcccctgcggggttggcttttacatggcatttatagacccgcccggagagggtgcgctgcgctcccgccatagtcccaccaccggtgagcgccgcccccactcggctgactctccgcccgccccgcgcccctcccctcacgggctctggccttaaccagagctcgcggactggcggggacaggtcccacctcctggctcccaggacgggtctgcaccaacctcagtttcggggctgcggctcacagaagtctaacctgcccgggacgcccgcaccaactcctgcgcgcggtccttccaaccctcctgctaccatgaagattgcagtgattggacagagcctgtttggccaggaagtttactgccacctgaggaaggagggccacgaagtggtgggtgtgttcactgttccagacaaggatggaaaggccgaccccctgggtctggaagctgagaaggatggagtgccggtattcaagtactcccggtggcgtgcaaaaggacaggctttgcctgatgtggtggcaaaataccaggctttgggggccgagctcaacgtcctgcccttctgcagccaattcatccccatggagataatcagtgccccccggcatggctccatcatctatcacccgtcactgctccctaggcaccgaggggcctcggccatcaactggaccctcattcacggagataagaaaggggggttttccatcttctgggcggatgatggtctggacaccggagacctgctgctgcagaaggagtgtgaggtgctcccggacgacaccgtgagcacgctgtacaaccgcttcctcttccctgaaggcatcaaagggatggtgcaggccgtgaggctgatcgctgagggcaaagcccccagactccctcagcctgaggaaggagccacctatgaggggattcagaagaaggagacagccaagatcaactgggaccagccggcagaggccattcacaactggatccgcgggaacgacaaggtgccgggagcctggacagaggcctgtgaacagaaactgacatttttcaactcaacgctgaacacttcaggcctggtgcccgagggagacgctttgcccatcccaggagcccatcggccaggggtggtcaccaaagcaggactcatcctctttgggaatgatgacaaaatgctgctggtgaagaatattcagctggaggatggcaaaatgatcctggcctcgaacttctttaagggggcagccagcagtgtccttgagctgacagaggcagagctggttactgcggaggctgtgcggagtgtttggcagcggatcctccccaaagtcctggaggttgaagactccactgatttcttcaagtcaggggccgcgtctgtggacgttgtgaggctggtggaggaagtgaaggagctgtgtgatggcctggagttagaaaatgaagatgtgtacatggcatccacctttggggacttcatccagctgttagtgaggaagctgcgaggggacgatgaggagggcgagtgcagcattgactacgtggaaatggcagtgaacaagcgcactgtccgcatgccccaccagctcttcattgggggggagttcgtggatgccgagggcgccaagacctctgagaccatcaatcccaccgatggaagtgtcatctgccaggtatccctggcccaagtcaccgacgtcgacaaggcagtggccgcagccaaggatgcctttgagaatggacggtgggggaagatcagtgcgcgggaccggggccggctgatgtacaggttggcagatctcatggagcagcaccaggaggagctggccaccattgaggccctggatgcgggtgccgtctacacgctggccctgaagacccacgtgggcatgtccatccagaccttccgctactttgctggctggtgtgacaagatccagggctccaccatccccatcaaccaggccagacccaaccgcaacctgaccttgaccaggaaggagcctgttggggtttgtggcatcatcatcccctggaactatcccctgatgatgctgtcctggaagacagctgcctgcctggctgccgggaacacagtggtgatcaagcctgctcaggtgaccccactcacagccttgaagtttgcagagctgacattaaaggccggcattcccaaaggtgtggttaacgtcctcccaggatctggctccctggtcggccagagactctcagaccatcctgatgtgaggaaaatcgggttcacaggctccacagaggtgggcaagcacatcatgaaaagctgtgccataagtaacgtgaagaaggtgtccctggaactgggcgggaagtcacccctcatcatctttgctgactgtgacctcaacaaggctgtgcagatggggatgagttctgttttcttcaacaaaggagagaattgcattgcagcaggccgactctttgtggaggactccattcatgatgagttcgtgcggagagtggtagaagaggtgcggaagatgaaggtgggcaacccgctggacagggacaccgaccacgggccgcagaatcaccatgcccaccttgtgaagctgatggagtactgccagcatggcgtgaaggaaggggccacactggtctgcggcgggaatcaggtccctcggccagggttcttctttgagccaactgttttcacagacgtggaagaccacatgttcatagccaaggaggagtccttcgggcctgtcatgatcatctctcggtttgctgatggggacttggatgccgtgctgtctcgggccaatgccacggaatttggcctggcttctggtgtcttcaccagggacatcaacaaggccctgtatgtcagtgacaagctccaggcaggcactgtgtttgtcaacacgtacaacaagaccgacgtggccgctcccttcggaggattcaaacagtctggatttggcaaagatctaggagaggcggctctgaacgagtacctgcgggtcaagacagtgaccttcgaatactgaagaaaggtctttgtgagaagaaagtccctgcccctccctcgtggctggggccccctccctcttgagcctgggtgcacagcacctcccacctggggggctagtggaagccctcctgcctgcacaccatgtctgcatcttggacgccctctgtccagtcagaagcagcccttggctgggtgaggtgtgcccctcccagggagaataaagcttctgaagag

SEQ ID NO: 51 - DNA, 2797 bp, Homo sapiens; identical to SEQ ID NO: 35
  source 1..2797: mol_type = genomic DNA

SEQ ID NO: 52 - DNA, 2192 bp, Homo sapiens
  source 1..2192: mol_type = genomic DNA
gcggctcacagaagtctaacctgcccgggacgcccgcaccaactcctgcgcgcggtccttccaaccctcctgctaccatgaagattgcagtgattggacagagcctgtttggccaggaagtttactgccacctgaggaaggagggccacgaagtggtgggtgtgttcactgttccagacaaggatggaaaggccgaccccctggacaccaggacagagtgacagaggaggagaccggagaggagagccagtccagtcagggcccaaacatcacaccagaggctctaacagagaactgaatacaaagaagtgttccttgggtattgaagagtggaaggcagagagcccaaagttattggggacagcgactgcaggaagcagctgccactgtctggaagctgagaaggatggagtgccggtattcaagtactcccggtggcgtgcaaaaggacaggctttgcctgatgtggtggcaaaataccaggctttgggggccgagctcaacgtcctgcccttctgcagccaattcatccccatggagataatcagtgccccccggcatggctccatcatctatcacccgtcactgctccctaggcaccgaggggcctcggccatcaactggaccctcattcacggagataagaaaggggggttttccatcttctgggcggatgatggtctggacaccggagacctgctgctgcagaaggagtgtgaggtgctcccggacgacaccgtgagcacgctgtacaaccgcttcctcttccctgaaggcatcaaagggatggtgcaggccgtgaggctgatcgctgagggcaaagcccccagactccctcagcctgaggaaggagccacctatgaggggattcagaagaaggagacagccaagatcaactgggaccagccggcagaggccattcacaactggatccgcgggaacgacaaggtgccgggagcctggacagaggcctgtgaacagaaactgacatttttcaactcaacgctgaacacttcaggcctggtgcccgagggagacgctttgcccatcccaggagcccatcggccaggggtggtcaccaaagcaggactcatcctctttgggaatgatgacaaaatgctgctggtgaagaatattcagctggaggatggcaaaatgatcctggcctcgaacttctttaagggggcagccagcagtgtccttgagctgacagaggcagagctggttactgcggaggctgtgcggagtgtttggcagcggatcctccccaaagtcctggaggttgaagactccactgatttcttcaagtcaggggccgcgtctgtggacgttgtgaggctggtggaggaagtgaaggagctgtgtgatggcctggagttagaaaatgaagatgtgtacatggcatccacctttggggacttcatccagctgttagtgaggaagctgcgaggggacgatgaggagggcgagtgcagcattgactacgtggaaatggcagtgaacaagcgcactgtccgcatgccccaccagctcttcattgggggggagttcgtggatgccgagggcgccaagacctctgagaccatcaatcccaccgatggaagtgtcatctgccaggtatccctggcccaagtcaccgacgtcgacaaggcagtggccgcagccaaggatgcctttgagaatggacggtgggggaagatcagtgcgcgggaccggggccggctgatgtacaggtgggagcccaacatgtacctgccagccactgccaccatcagcttctgggcagtggcacgggggggacttctgtggaggcccttttacctgccaggaggagctgggtcctggggaggctatgggaccgaggccatcagatgggccaggctggggctccttgcctgaggctcagaaaaggcttctcagaggaagggatatgagaaacaggagacatttcagcagagtgggctcaggggaggtgcctggtggaggtgaggaggtgcggaagccaagggatgcttccaaagtgggcgcaggctgggcctcccaggcagacaaagcacttccctcaccagcctgggctggaggggacttagctcctgcacgcagaagacagcaagggccagagaagggctggcctggtctctgcttgctcagccaggctctgactactggaatctataggtttcacattttct

SEQ ID NO: 53 - DNA, 615 bp, Homo sapiens
  source 1..615: mol_type = genomic DNA
atatctgatatgtgataccatatgggagcaggctctgaaagaacactacaagtagagaggtccttccaaccctcctgctaccatgaagattgcagtgattggacagagcctgtttggccaggaagtttactgccacctgaggaaggagggccacgaagtggtgggtgtgttcactgttccagacaaggatggaaaggccgaccccctgggtctggaagctgagaaggatggagtgccggtattcaagtactcccggtggcgtgcaaaaggacaggctttgcctgatgtggtggcaaaataccaggctttgggggccgagctcaacgtcctgcccttctgcagccaattcatccccatggagataatcagtgccccccggcatggctccatcatctatcacccgtcactgctccctaggcaccgaggggcctcggccatcaactggaccctcattcacggagataagaaaggggggttttccatcttctgggcggatgatggtctggacaccggagacctgctgctgcagaaggagtgtgaggtgctcccggacgacaccgtgagcacgctgtacaaccgcttcctcttccctgaaggcatcaaagggatggtgca

SEQ ID NO: 54 - DNA, 1020 bp, Homo sapiens
  source 1..1020: mol_type = genomic DNA
acagtaagtcttcttgacctaagcgggaaagagcgcaggcccctgcggggttggcttttacatggcatttatagacccgcccggagagggtgcgctgcgctcccgccatagtcccaccaccggtgagcgccgcccccactcggctgactctccgcccgccccgcgcccctcccctcacgggctctggccttaaccagagctcgcggactggcggggacaggtcccacctcctggctcccaggacgggtctgcaccaacctcagtttcggggctgcggctcacagaagtctaacctgcccgggacgcccgcaccaactcctgcgcgcggtgagtttctgggctctcgagagcgctggactcccggcggaaaggaggctgccccggctgcagctccgggggctccgggggctccaggggctccaggactcggttctcaccgcaagggctcctgcggggcccatcaacttcgccgctgggacgccgggctcggggtccttccaaccctcctgctaccatgaagattgcagtgattggacagagcctgtttggccaggaagtttactgccacctgaggaaggagggccacgaagtggtgggtgtgttcactgttccagacaaggatggaaaggccgaccccctgggtctggaagctgagaaggatggagtgccggtattcaagtactcccggtggcgtgcaaaaggacaggctttgcctgatgtggtggcaaaataccaggctttgggggccgagctcaacgtcctgcccttctgcagccaattcatccccatggagataatcagtgccccccggcatggctccatcatctatcacccgtcactgctccctaggcaccgaggggcctcggccatcaactggaccctcattcacggagataagaaaggggggttttccatcttctgggcggatgatggtctggacaccggagacctgctgctgcagaaggagtgtgaggtgctcccggacgacaccgtgagcacgctgtacaaccgcttcctctt

SEQ ID NO: 55 - DNA, 689 bp, Homo sapiens
  source 1..689: mol_type = genomic DNA
ctttcgctctgctgtgtccgtagcacatggcaggtacttggcccatcaagagtgagagagggtgagcgagtgagtgagtcaccggcttggcgagggtctcctctgacccacttagccttgccagcgctcagaactgccagccctgctgggtgcttgggacttttcaaagccctgggaattctccaagggtccacagtccttccaaccctcctgctaccatgaagattgcagtgattggacagagcctgtttggccaggaagtttactgccacctgaggaaggagggccacgaagtggtgggtgtgttcactgttccagacaaggatggaaaggccgaccccctgggtctggaagctgagaaggatggagtgccggtattcaagtactcccggtggcgtgcaaaaggacaggctttgcctgatgtggtggcaaaataccaggctttgggggccgagctcaacgtcctgcccttctgcagccaattcatccccatggagataatcagtgccccccggcatggctccatcatctatcacccgtcactgctccctaggcaccgaggggcctcggccatcaactggaccctcattcacggagataagaaaggggggttttccatcttctgggcggatgatggtctggacaccggagacctgctgctgcagaaggagtgtgaggtgctcccggac

SEQ ID NO: 56 - DNA, 583 bp, Homo sapiens
  source 1..583: mol_type = genomic DNA
gttctgtacctcacttctgatttctgcaagtcacttcctttttttttttgtctataaatttgttctgtccacgaggcaaccctggagtctctctgaatctgctgtgattctgagggctgcccaatttgtgaatcgttcattgctcaattaaacttttttaaatttaatttggctgaagtttttcttttaacatggtgtcagaagcgggatccaaagtacagcttctagcgacccccaggagtactgagtgaacaagcaaggtccttccaaccctcctgctaccatgaagattgcagtgattggacagagcctgtttggccaggaagtttactgccacctgaggaaggagggccacgaagtggtgggtgtgttcactgttccagacaaggatggaaaggccgaccccctgggtctggaagctgagaaggatggagtgccggtattcaagtactcccggtggcgtgcaaaaggacaggctttgcctgatgtggtggcaaaataccaggctttgggggccgagctcaacgtcctgcccttctgcagccaattcatccccatggagataatcagtgccccccggcat

SEQ ID NO: 57 - DNA, 583 bp, Homo sapiens
  source 1..583: mol_type = genomic DNA
ataaatttgttctgtccacgaggcaaccctggagtctctctgaatctgctgtgattctgagggctgcccaatttgtgaatcgttcattgctcaattaaacttttttaaatttaatttggctgaagtttttcttttaacatggtgtcagaagcgggatccaaagtacagcttctagcgacccccaggagtactgagtgaacaagcaaggtccttccaaccctcctgctaccatgaagattgcagtgattggacagagcctgtttggccaggaagtttactgccacctgaggaaggagggccacgaagtggtgggtgtgttcactgttccagacaaggatggaaaggccgaccccctggacaccaggacagagtgacagaggaggagaccggagaggagagccagtccagtcagggcccaaacatcacaccagaggctctaacagagaactgaatacaaagaagtgttccttgggtattgaagagtggaaggcagagagcccaaagttattggggacagcgactgcaggaagcagctgccactgtctggaagctgagaaggatggagtgccggtattcaagtact

SEQ ID NO: 58 - protein, 505 aa, Homo sapiens
MKIAVIGQSLFGQEVYCHLRKEGHEVVGVFTVPDKDGKADPLGLEAEKDGVPVFKYSRWRAKGQALPDVVAKYQALGAELNVLPFCSQFIPMEIISAPRHGSIIYHPSLLPRHRGASAINWTLIHGDKKGGFSIFWADDGLDTGDLLLQKECEVLPDDTVSTLYNRFLFPEGIKGMVQAVRLIAEGKAPRLPQPEEGATYEGIQKKETAKINWDQPAEAIHNWIRGNDKVPGAWTEACEQKLTFFNSTLNTSGLVPEGDALPIPGAHRPGVVTKAGLILFGNDDKMLLVKNIQLEDGKMILASNFFKGAASSVLELTEAELVTAEAVRSVWQRILPKVLEVEDSTDFFKSGAASVDVVRLVEEVKELCDGLELENEDVYMASTFGDFIQLLVRKLRGDDEEGECSIDYVEMAVNKRTVRMPHQLFIGGEFVDAEGAKTSETINPTDGSVICQVSLAQVTDVDKAVAAAKDAFENGRWGKISARDRGRLMYRAPPSPSTRPDPTAT

SEQ ID NO: 59 - protein, 912 aa, Homo sapiens
MAGPSNPPATMKIAVIGQSLFGQEVYCHLRKEGHEVVGVFTVPDKDGKADPLGLEAEKDGVPVFKYSRWRAKGQALPDVVAKYQALGAELNVLPFCSQFIPMEIISAPRHGSIIYHPSLLPRHRGASAINWTLIHGDKKGGFSIFWADDGLDTGDLLLQKECEVLPDDTVSTLYNRFLFPEGIKGMVQAVRLIAEGKAPRLPQPEEGATYEGIQKKETAKINWDQPAEAIHNWIRGNDKVPGAWTEACEQKLTFFNSTLNTSGLVPEGDALPIPGAHRPGVVTKAGLILFGNDDKMLLVKNIQLEDGKMILASNFFKGAASSVLELTEAELVTAEAVRSVWQRILPKVLEVEDSTDFFKSGAASVDVVRLVEEVKELCDGLELENEDVYMASTFGDFIQLLVRKLRGDDEEGECSIDYVEMAVNKRTVRMPHQLFIGGEFVDAEGAKTSETINPTDGSVICQVSLAQVTDVDKAVAAAKDAFENGRWGKISARDRGRLMYRLADLMEQHQEELATIEALDAGAVYTLALKTHVGMSIQTFRYFAGWCDKIQGSTIPINQARPNRNLTLTRKEPVGVCGIIIPWNYPLMMLSWKTAACLAAGNTVVIKPAQVTPLTALKFAELTLKAGIPKGVVNVLPGSGSLVGQRLSDHPDVRKIGFTGSTEVGKHIMKSCAISNVKKVSLELGGKSPLIIFADCDLNKAVQMGMSSVFFNKGENCIAAGRLFVEDSIHDEFVRRVVEEVRKMKVGNPLDRDTDHGPQNHHAHLVKLMEYCQHGVKEGATLVCGGNQVPRPGFFFEPTVFTDVEDHMFIAKEESFGPVMIISRFADGDLDAVLSRANATEFGLASGVFTRDINKALYVSDKLQAGTVFVNTYNKTDVAAPFGGFKQSGFGKDLGEAALNEYLRVKTVTFEY

SEQ ID NO: 60 - protein, 902 aa, Homo sapiens
MKIAVIGQSLFGQEVYCHLRKEGHEVVGVFTVPDKDGKADPLGLEAEKDGVPVFKYSRWRAKGQALPDVVAKYQALGAELNVLPFCSQFIPMEIISAPRHGSIIYHPSLLPRHRGASAINWTLIHGDKKGGFSIFWADDGLDTGDLLLQKECEVLPDDTVSTLYNRFLFPEGIKGMVQAVRLIAEGKAPRLPQPEEGATYEGIQKKETAKINWDQPAEAIHNWIRGNDKVPGAWTEACEQKLTFFNSTLNTSGLVPEGDALPIPGAHRPGVVTKAGLILFGNDDKMLLVKNIQLEDGKMILASNFFKGAASSVLELTEAELVTAEAVRSVWQRILPKVLEVEDSTDFFKSGAASVDVVRLVEEVKELCDGLELENEDVYMASTFGDFIQLLVRKLRGDDEEGECSIDYVEMAVNKRTVRMPHQLFIGGEFVDAEGAKTSETINPTDGSVICQVSLAQVTDVDKAVAAAKDAFENGRWGKISARDRGRLMYRLADLMEQHQEELATIEALDAGAVYTLALKTHVGMSIQTFRYFAGWCDKIQGSTIPINQARPNRNLTLTRKEPVGVCGIIIPWNYPLMMLSWKTAACLAAGNTVVIKPAQVTPLTALKFAELTLKAGIPKGVVNVLPGSGSLVGQRLSDHPDVRKIGFTGSTEVGKHIMKSCAISNVKKVSLELGGKSPLIIFADCDLNKAVQMGMSSVFFNKGENCIAAGRLFVEDSIHDEFVRRVVEEVRKMKVGNPLDRDTDHGPQNHHAHLVKLMEYCQHGVKEGATLVCGGNQVPRPGFFFEPTVFTDVEDHMFIAKEESFGPVMIISRFADGDLDAVLSRANATEFGLASGVFTRDINKALYVSDKLQAGTVFVNTYNKTDVAAPFGGFKQSGFGKDLGEAALNEYLRVKTVTFEY

SEQ ID NO: 61 - protein, 801 aa, Homo sapiens
MKIAVIGQSLFGQEVYCHLRKEGHEVVGVFTVPDKDGKADPLGLEAEKDGVPVFKYSRWRAKGQALPDVVAKYQALGAELNVLPFCSQFIPMEIISAPRHGSIIYHPSLLPRHRGASAIHNWIRGNDKVPGAWTEACEQKLTFFNSTLNTSGLVPEGDALPIPGAHRPGVVTKAGLILFGNDDKMLLVKNIQLEDGKMILASNFFKGAASSVLELTEAELVTAEAVRSVWQRILPKVLEVEDSTDFFKSGAASVDVVRLVEEVKELCDGLELENEDVYMASTFGDFIQLLVRKLRGDDEEGECSIDYVEMAVNKRTVRMPHQLFIGGEFVDAEGAKTSETINPTDGSVICQVSLAQVTDVDKAVAAAKDAFENGRWGKISARDRGRLMYRLADLMEQHQEELATIEALDAGAVYTLALKTHVGMSIQTFRYFAGWCDKIQGSTIPINQARPNRNLTLTRKEPVGVCGIIIPWNYPLMMLSWKTAACLAAGNTVVIKPAQVTPLTALKFAELTLKAGIPKGVVNVLPGSGSLVGQRLSDHPDVRKIGFTGSTEVGKHIMKSCAISNVKKVSLELGGKSPLIIFADCDLNKAVQMGMSSVFFNKGENCIAAGRLFVEDSIHDEFVRRVVEEVRKMKVGNPLDRDTDHGPQNHHAHLVKLMEYCQHGVKEGATLVCGGNQVPRPGFFFEPTVFTDVEDHMFIAKEESFGPVMIISRFADGDLDAVLSRANATEFGLASGVFTRDINKALYVSDKLQAGTVFVNTYNKTDVAAPFGGFKQSGFGKDLGEAALNEYLRVKTVTFEY

SEQ ID NO: 62 - protein, 470 aa, Homo sapiens [sequence omitted]

SEQ ID NO: 63 - protein, 954 aa, Homo sapiens
QSSRTGGDRSHLLAPRTGLHQPQFRGCGSQKSNLPGTPAPTPARGPSNPPATMKIAVIGQSLFGQEVYCHLRKEGHEVVGVFTVPDKDGKADPLGLEAEKDGVPVFKYSRWRAKGQALPDVVAKYQALGAELNVLPFCSQFIPMEIISAPRHGSIIYHPSLLPRHRGASAINWTLIHGDKKGGFSIFWADDGLDTGDLLLQKECEVLPDDTVSTLYNRFLFPEGIKGMVQAVRLIAEGKAPRLPQPEEGATYEGIQKKETAKINWDQPAEAIHNWIRGNDKVPGAWTEACEQKLTFFNSTLNTSGLVPEGDALPIPGAHRPGVVTKAGLILFGNDDKMLLVKNIQLEDGKMILASNFFKGAASSVLELTEAELVTAEAVRSVWQRILPKVLEVEDSTDFFKSGAASVDVVRLVEEVKELCDGLELENEDVYMASTFGDFIQLLVRKLRGDDEEGECSIDYVEMAVNKRTVRMPHQLFIGGEFVDAEGAKTSETINPTDGSVICQVSLAQVTDVDKAVAAAKDAFENGRWGKISARDRGRLMYRLADLMEQHQEELATIEALDAGAVYTLALKTHVGMSIQTFRYFAGWCDKIQGSTIPINQARPNRNLTLTRKEPVGVCGIIIPWNYPLMMLSWKTAACLAAGNTVVIKPAQVTPLTALKFAELTLKAGIPKGVVNVLPGSGSLVGQRLSDHPDVRKIGFTGSTEVGKHIMKSCAISNVKKVSLELGGKSPLIIFADCDLNKAVQMGMSSVFFNKGENCIAAGRLFVEDSIHDEFVRRVVEEVRKMKVGNPLDRDTDHGPQNHHAHLVKLMEYCQHGVKEGATLVCGGNQVPRPGFFFEPTVFTGVEDHMFIAKEESFGPVMIISRFADGDLDAVLSRANATEFGLASGVFTRDINKALYVSDKLQAGTVFVNTYNKTDVAAPFGGFKQSGFGKDLGEAALNEYLRVKTVTFEY

SEQ ID NO: 64 - protein, 555 aa, Homo sapiens
MKIAVIGQSLFGQEVYCHLRKEGHEVVGVFTVPDKDGKADPLGLEAEKDGVPVFKYSRWRAKGQALPDVVAKYQALGAELNVLPFCSQFIPMEIISAPRHGSIIYHPSLLPRHRGASAINWTLIHGDKKGGFSIFWADDGLDTGDLLLQKECEVLPDDTVSTLYNRFLFPEGIKGMVQAVRLIAEGKAPRLPQPEEGATYEGIQKKETAKINWDQPAEAIHNWIRGNDKVPGAWTEACEQKLTFFNSTLNTSGLVPEGDALPIPGAHRPGVVTKAGLILFGNDDKMLLVKNIQLEDGKMILASNFFKGAASSVLELTEAELVTAEAVRSVWQRILPKVLEVEDSTDFFKSGAASVDVVRLVEEVKELCDGLELENEDVYMASTFGDFIQLLVRKLRGDDEEGECSIDYVEMAVNKRTVRMPHQLFIGGEFVDAEGAKTSETINPTDGSVICQVSLAQVTDVDKAVAAAKDAFENGRWGKISARDRGRLMYRLADLMEQHQEELATIEALDAGAVYTLALKTHVGMSIQTFRYFAGWCDKIQGSTIPINQARPNRN

SEQ ID NO: 65 - protein, 240 aa, Homo sapiens
IISAPRHGSIIYHPSLLPRHRGASAINWTLIHGDKKGGFSIFWADDGLDTGDLLLQKECEVLPDDTVSTLYNRFLFPEGIKGMAVRLIAEGKAPRLPQPEEGATYEGIQKKETAKINWDQPAEAIHNWIRGNDKVPGAWTEACEQKLTFFNSTLNTSGLVPEGDALPIPGAHRPGVVTKAGLILFGNDDKMVRARLWVTCLLKATHAPVLGLRPHRKTLGSSGENGKNQTQEGTLTLICP

SEQ ID NO: 66 - protein, 160 aa, Homo sapiens
MVQAVRLIAEGKAPRLPQPEEGATYEGIQKKETAKINWDQPAEAIHNWIRGNDKVPGAWTEACEQKLTFFNSTLNTSGLVPEGDALPIPGAHRPGVVTKAGLILFGNDDKMVRARLWVTCLLKATHAPVLGLRPHRKTLGSSGENGKNQTQEGTLTLICP

SEQ ID NO: 67 - protein, 210 aa, Homo sapiens
MKIAVIGQSLFGQEVYCHLRKEGHEVVGVFTVPDKDGKADPLGLEAEKDGVPVFKYSRWRAKGQALPDVVAKYQALGAELNVLPFCSQFIPMEIISAPRHGSIIYHPSLLPRHRGASAINWTLIHGDKKGGFSIFWADDGLDTGDLLLQKECEVLPDDTVSTLYNRFLFPEGIKGMVQAVRLIAEGKAPRLPQPEEGATYEGIQKKETAK

SEQ ID NO: 68 - protein, 47 aa, Homo sapiens
MKIAVIGQSLFGQEVYCHLRKEGHEVVGVFTVPDKDGKADPLDTRTE

SEQ ID NO: 69 - protein, 177 aa, Homo sapiens
MKIAVIGQSLFGQEVYCHLRKEGHEVVGVFTVPDKDGKADPLGLEAEKDGVPVFKYSRWRAKGQALPDVVAKYQALGAELNVLPFCSQFIPMEIISAPRHGSIIYHPSLLPRHRGASAINWTLIHGDKKGGFSIFWADDGLDTGDLLLQKECEVLPDDTVSTLYNRFLFPEGIKGMV

SEQ ID NO: 70 - protein, 168 aa, Homo sapiens
MKIAVIGQSLFGQEVYCHLRKEGHEVVGVFTVPDKDGKADPLGLEAEKDGVPVFKYSRWRAKGQALPDVVAKYQALGAELNVLPFCSQFIPMEIISAPRHGSIIYHPSLLPRHRGASAINWTLIHGDKKGGFSIFWADDGLDTGDLLLQKECEVLPDDTVSTLYNRFL

SEQ ID NO: 71 - protein, 157 aa, Homo sapiens
MKIAVIGQSLFGQEVYCHLRKEGHEVVGVFTVPDKDGKADPLGLEAEKDGVPVFKYSRWRAKGQALPDVVAKYQALGAELNVLPFCSQFIPMEIISAPRHGSIIYHPSLLPRHRGASAINWTLIHGDKKGGFSIFWADDGLDTGDLLLQKECEVLPD

SEQ ID NO: 72 - protein, 100 aa, Homo sapiens
MKIAVIGQSLFGQEVYCHLRKEGHEVVGVFTVPDKDGKADPLGLEAEKDGVPVFKYSRWRAKGQALPDVVAKYQALGAELNVLPFCSQFIPMEIISAPRH

SEQ ID NO: 73 - DNA, 28226 bp, Homo sapiens
  source 1..28226: mol_type = genomic DNA
gcacaggacaattgtgcttgctcttggaaggtcacatggatttgactgtggctctgctcactgatgcgcagcaagtgttggctcccaccgcctccagaatccaactcactggacaccgctgcctcttcggccaccaggtacccgtgcgccgccttgtgacaggtttagtgcgggcatcggggactagcaaaggatcagtccgttccctgtggagctcacggttctgtgcgcttcgtttctccttcgcagccgcttgttctgactgccggacacagcgcccgccctcttcccacgagagtgacccggtcgggacagggtccccgccctagccctgcacccccgtcccggcctaaacagatagcccacctcggccctccatgccccacccggctctgactgtgtccccgcctccaacctgggccgccagcacctcctgcaggcgccgggcgccgctgcctcgcaccggccagagcagctgccgccacagcggttcagctgttattaatgttttaaaattgtcagtcgcctgcctgcccgcccgcccacctgccttcttttcttttcttttcttttcttctcttttcttttcttttctttcttttcttttcttttcttttcttttcttttctttcttttcttttcttttctttctttcttgctttcctctttctttcttccttccttccttctttctttctttctttttctttctttctttccttccttcccgtctttcttcctttctttcaactttctttcttctttctctctctttcttcctttctttctttttctttctctctctttctttttctttctttctttctttcttctttcttgtttgcttgccctttctttctctccctcgctctctccttccttcctttgtatcttttttctttctttttttgttcttccctgtttgtttgtttgtttgttttgagacagagtctcactccgttgcctagactggagtgcaatggcgtgagctcggctcactgcagccacacctcccgggctcaagcgattctcctgcctcagcctccaagtagctggggctacaggcatgtgccaccacgcctggctaatttttgcatttttagtagagacagggtttcatcatgttgcccaggctggtctcaaacttctaggctcaagctttcctataataaaaaaatagattttccaacagcattaatagattaaaaatataataagaaaatgtccaatttaacataacagaaatcttcttaaaacaaacttaagaagtgcacagggccagttgtcaaaagaactacaaacatttagtgaattataaaaattaagatgtgaatacagaagcatattatttttcttgatggcaagtttcactaacatatcaattatttcctaatttgtttataagtttagtataatttcaatcaaaatatctaattgggaacttcatgaaatcattctaaactgtgtttaaaaaattaagaggtaataagagcaagaaatattggaaggagattatgaggagtatattctttcagatgtctaaatgcatcataaagctgcaatcaataaaacagtgttaagaatagcacaactattcttaattttctaatcagacggggatctctgagcacttcataaagagcatagcctatgaagagattactggacaacagcccaagggtaagttgaacagacttttttctgatcatgaccttcagacaaatcagatggtgtcataccaaaagcacgcaagtgctattcctccaaaatgattccagtaggaaaggtgtaggcacaagcatataaggttctcattcttgatacctctgagatcattcaaactagatggactgcatcttcttcaagcaatcctcccctaatatttcataccaaaagcacacaagtgctattcctccaaaatgattccagtaggaaaggtgtaggcacaagcatataaggttctcattcttgatacctctgagatcattcaaactagatggactgcatcttcttcaagcaatcctcccctaatatttctttgcagtgattgtttgctaaatcattagggaacttaaggccaagtttattttcctttgctgtggaataaagatatttgtgtgcatatatatatatatatatatgtaagtgtgtgtgtgattcatatataagatacatatgtatataaacaatcaagataagtgaaagacagggcctttcaaaggccaagggacacacaggctacttccatacttttaagtttccagtaaatataataaaagtgaagaaatggcaaaaccagagttaccaaaacttgtggtataaattggatttatacgtttagtaaagtaatgctttgaatccatgcatgaagcaataactgtgtgtaaaactcatttggtgataacatccaaaatgaattttaggcctgatatgatttggatgtgtgacccctccagatttcatgttgaaatgtgatctgcgatgctgaaggtggggctaggtgggaagtgttaaatcatgggggtagatccctcatgaatagcttagcaccacttccttggtgattagtgagttctcattcagctagttcactcaagatctggttatttaagagtgtgggacctccccctgctctctcttgctccctcttgccatgtggtatactggctccccctttgccttctattatgactaaaaagcttcctgaggccctcaccagaagctgagctgatgttggtgccatgcctgtacagcctgcagaactgtcagctgaaataaacctcttttctttataaattacccagtctcagatattcctttgtagcaattccttttagctgtgtccccactcaaatctcatcttgaattgtagttcccataatccccatgtgtcatgggaaagacctggtaggaggtaattgaatcatgggggcagctacccccatgctgctgttctcatgatagtgagtgcattcccatgagatctgatggttttataaggggcttttcccccttttgcttggcacttctccttgctgccatcatttgaagcaggacgtgtttgctcttccttctgccatgattgtaagtttcctgaggcctcctcagccatgctgaactctaagtcaattaaacttcttttctttataaattacccagtcttgggtgtgtctttattagcagcgtgagaacagactaatacacaacccaaacagattaacacaaagcctttcttgattgtgaagctcagactctcccctagcattggtctgatgaaagttaaggagccagaccattcagcctctactcagcagacgacgacacacatgtggaagctgatacaagcattgttttactccatttcaaaaattgtctttactttatttcaaatgaatgcctaaaacaccagatacttatagtctgtatattactaaccaagtagctctagtcttggctagatttcctacatgcctacgataaaaacattgatacttacctaattttaagcagtgttattcttgattttagcaagcaaatgtgtaagtgtttttcttgtgtgggctttgagttttataacccagtttaaagaaggtggatgtctatttaaaaaatagcttcaggttcaaaatctcctgtatcttcccttgcctttcttcctggcaatgattagctaacaaggccagtgtctgttctggtcatgtctagctcaagaaaacgaaattacatcatctgagtataaaggaattgttgtcctttgttaattcttctctggtgttttcttgtctatttcacccccaaagtcacagggcaaaggggcaggggagaaaacagatatgtagaaggactgcttctcatcacagctcagcatccaactccatcctccatttcatacaaacacactgtgagttctatctcggagcagaaacactctacacattcccaacctgtttgcagtttccttattttgattcttccctgcagtatcagaggaaaagagactgcctttcctctgaactcatttatagcattcccctttgcctctcctgtggcctcacaacacaaccttggaatatacttaaaagagaaactaaaattgtgatgcaataccaaaagtgccgtttaaagaatatggaacgtgttaaaggaagaaaacggtttttgtgagtcaacttgttgctagcagagcagataaccctgtacaataggccagtacattgatctgtttggaaatataaagtttaaaggtgagttgaagactgctgcccaggggagaaaaagtaactcagatctctgagtggaatttgtgaggaaatagatgaggaggagagatgagaaaggagagaagagaagcagagtttgaagcagtgaatagaacacaccatacatggtatctcatacaaggtgtggtatttcaaaggacttctacaaataaggatgactaatgctcaattttgtttattttctgtcttctttttctcttcctatgatcagttgacaggattaaggctcaattttaaattgatctgttgccaccatgtaattcccatttctctttgtaaacttttagttatgtctacataaaggctttttgaaagtgaaatttttgtttgtttgtttgtttgttttggggttttatggaaatcaaataaagggaaccaaatttcccatcatggcactggcagggctggtacaagggtctgctgtgatgagccaggtacttgactgaactgagttagtgaaatgagaagctctgagccaaggtgacattaatattataactcccttgggaagttccccccaaattaggggaaagcattgaactttctggaagttgtagaatgaagatttgagccagccctttctgtatctaaaaagacaaggagaccccagctgagatctgagctatacatacctatgtgtgatcctgctttctcttccctattagacctgagtcaaaagggaccctcacttttgcagaatctctataggcagcttccctcataggtccaggatggataagggagtacatgcatcttgaggaagaagatgtcagagactatgcctttggggttggaggaggggagagggcactggagaaatgactggcaaatttaccttcacacactgtgagcaagaggtagctgcttgttttctctgaccacaacatcccagaatataattattatatttttacttattcatttacttaacagctgtatgagacataatttgcatatcataaaattcatctatttaaagcacaaaatccaatggtcttcagcagatttacaaagtcgagcaagcagcttcactatctaattttagaaaaatgttgtcattccaaaagaaatccaatgtacattagcagttactccccattccctctgccctaactgatctaggcaatactaatatattttctgtctctgtggatttgtatattttagatattgtatataaatggaatcatacaatatgtgagtttttgtgcctggcttttctcacttagcataatgtgttcaaggttcatccatgtcgtatcttgtatcagtacgtcattcctctttatgactcaataatgttccatggtatggatatatcacattttgtttatccatttgccagttgatgaacatttggtttgtttcctctttttggctgttatggatgatactgctgtgcatactagggtgtgtgtttacgtggatgtatgtttttatttctcttgggtagatacccaggagtggaattcctgggtcatatggtaaaaaacataattattttttaataaatgactgcctttctattcttcccattttttttaactgacagcttttccattcctccttcggatcagagggtctctgttctcacttggcaaatgacccaaagaaaagccattaaacggagtggcaaaaagagcaggcccgccctgggtctgggtaggaaataaattgcaagagcatgaataccctccttttctcccctccaaggaagccaggacatctgctgcctggtcatgatcactgagcatgcagcctcctgctggagtgccagcaattggacgaattttcctgggctccctgccacagagataacttgttccagcctcttatttacacctccatctggcaccccagtgggggatctagcacgcctaagagtcagctgtgccacggaggacaggcgtgctctggtgcaggccagccacacaccttgaatgacatggcggaggggtgctaacgaggtcagctgtctgcctgcctggaaggttgggtcttccagctgcccgatctgcttctaactcaggaaacatgggtgcaaggccttatctctttatttatcttccctccttcattcctttttacactttccacaaataatattgccattttctctattttcctcaaacgtgcttctacttctctccatcttttctgaatgtaagttatacccacctttggtttatgtaacaggggatgaagtctttctttatttgtagctccccactgccttctacaggggtactcttcttggatgcgagtatacaacctctgagatgaactcaggctccagcttcattttctacataataaatggagaaatcttttgagggtggaagtgggatggaagattccagatgaaggacacaggagataatgagatgagattgaatgctgtgggagcaaaaattttgaaaggacttctctttggtgacagagggagagaagaatgtggagaatgtggaaaggagaaaggcatagtgacaatgatcatcacaggacgtgttatttatgtggtacttacctttgctaggtatatgcttaacactttgattcattattcaacccaatcctccaacaatgttgtagggtacgttttattattattattatttttgctgaggaggaaactgaagttcaaaaaggttagagaacttttccaaagtaacccagcccaaaagctctgggctggaatttgaaacaagtttgatctgacttcaaagtccacattcttaataactaagttatattggcactccaagaaggtttatagctgaaccttctgaagggcagagagttgaatttgtaggtgactggattaataacctgggaagcggagtggctccattcttcactttgtgtgagagcaggtggcactgaggtggccactgacaggcctgccacccgcacacgctgctggctgcttgccccttgccagtctgggacttttagccaggcttccaggaaagtgtagttctggatttggtcaggctggcattcttcattcctaaagggtgctgaagtgagatgcaggaaatccaaatagctggaggaaaagaggcaggatattagaactacctgtttcttccatacataccagcattctgaagatttctaggtaagagtcaataaataatccataccaacagcacttctcaacagaaaacatttcttcttcttcttcttcttcttcttcttcttcttcttcttcttcttcttcttcttcttcttcctcttcctcttcctcttcctcttcctctccttctccttctccttctccttctccttcttcttcttcttctccttcttctttttgagatgcagtctcgctctgtcacccaagctggagtgcagtcgcctatctctgctcactgcaacctccgcctcccgggttcaagcgattctcctgcctcagccccctgagtaactggaaatacaggcgcccaccaacacactcaactaatttttgcatttttagtagagatgcgttttcattatattggccaggctgatccacccgccttggcctcccaaacggctgggattacaggcatgagccacagtgcctggcctgaaaacattttatcttctaatctatatttattatattactgtttaaaattattttcttttttctagagtaaccatatatctcaaaaacacgcaatttgggcagcaaagaccacagaatagcacagctagaagagacccccattttgctgtatagataagaattcaaagccctggttggcttaagagtcatagatctgtgtttcagtccctacactgctgcttactaatggtgggaccttggggaagataccagatcatctcccccctttccaaaacaatgcctatgctgctgaggtagtggagattaaatgacacattctagagcccagaaaagtctccctaatagtacgtgctcaactaatgggaatacgctccagtgggcaatgtcatcaaggcaaagctagggccaaaaccttgttttctgattctcaaacttgtgtgtgcatgcgtgtgtgtgtgtgtgtgtgtgcatgtgtatgtgcacacacaggcatcagctgtgtaatgctcgctttataatattttacacttatgtaggtcttcgtagttttcagagcactaatttacatgatatcgtttgatcaccgcaacaacacagtaaaattaggcagtagtggtattatcaggccactttacacgttagagaagggaggctgggaaaagctgactttgttcagctccatggccagtcaacagcagaactggactcagcacccacatacctcatgcctccttatctagagatttttccaccctagcaaaaggccatctcaccttaatgccaaagagttttatgaaagttttatgaaagagtttctgaaaagttgttataaggaagagtgaaataaatactgtgctgggggtcataaatgacctaggtaattaacaacctgattagatagggaaaaactgaactttgagatgattgagcaaaagacaaagagaaaacactgacaaggcagttaacaacccaattcaaagacatatggagaaatgggggttggtggacacttcagaccactgtgtaactctttcctgtcagctaaatactcgtcactgagtgtgaaattatttcctgttcactctgcctctgcaacatcctaactgcatgtccatatttcctcagacaaggaaatcctccagttcttcaacatacttcaagcatcagctttactctttagtcaaaggggtatttttaagccccacaatttggatactattgaatttacttaccctggatacttgaatatacaaggcactctagtgttcctagaatacacagagttcagatttcttagtgatgaagagcatctaaaaaaattaccacaaggaaatgaaatgggacccatgactctttcattctcatatctgctgcaccccagtggctgttgctcctggacttcatggtggtgctttaaaactatttataccgtcagatttggagcatcttaaaaacctaccacatctctctcacaaactgacatctaatactctgattctatgaacagactaaaaaaaccattggagtgtacattttaagtgggtgaattgtatctatgtgaattctatctcaataaaaccgtaaaagaattgaaagcagagtctaaataaagatatttgtacacccatgttcatagcagcattattcacaatagccaaaaggtagaagcaacccgagtgtctatcaacagacgaatggataaacaaaatgcagcatacaatggaatattattcagctttaaaaaggaaggaaattctgacacacactacaatgtggatgaaacttgaggacattgtaccaagtgaaataagccagacacaaaaagacaacaactctatgatttcacttacgtgaggtacatagtgtagtcaaattgatagagacagaaagcagaatggtggttgctagggggtggtggggaggatgaatggagagttgttgtttaatggtatagagttttaattttgcaagatgaaaagagttctgaagattggttgcccaacaatgtgaatacacttaatgctactaatctgaacacttaaaaatggctaagatggtaaattttgtgttatgtgtgttgtaccagaatttactgaaagtagggaggctgtggttcttgtgtaccattgcaaggcactacagcctggattcctgtgaaattccaaatgagcaatgatagaagagttttcagaacctagtatagttttagaagaaaggaatgttcatactctacttattatttatttcaaagttctctgggatgagaattataagccagttactctagacttttctgagattgatactaatatacacctatattgatactcatatatctattgattcatttattccacaaaagttgattggtgtctaggcatagtgctggataatgaggaaacattggtaagacattactaccccctacccccctaggtcttacagtctgacagattgaatcaattgacttggccttgtaaaaaatctcgaatatttgggcttttcataggacttttctttaatgttacttcacacagtcatccataaatgctgcagtgacaacagcagcaacaacaacaacaatctcttggtgtttttatgtacattcttgtatttggtttgattttatttgattctcaacttcaatcttctcttccttttagaatgcaggtttcttgagaataggccagtcttactcacctcgtatcctctaaaaagtctccatagctaacaaaatgccttatacacataacagcaaaacacttttgagagccatgctgagaaaacatagctctatctctagaccaaagtaataactactgattttggggtcctgaaactattccaaccaccaaagcagattgcaatatgataaggaaatatctgtaccacagtttggaaaatatattttaaaatgccaatcgtgattcttccagttgcattgtgtaatgtggtctctttttatgaaagttctttctctataatattgctaattctacagtaagtgtaactctataatatgtgagatttatttgcatgtagaagtttgcttatgactcagacctcatgttatgcattaataacacatttatctcatggcctgtggattgacttatatagatatcacattcaaaccagaagaaatatctagagttgggcagggagtagagaataagcgaggctgttgttagaagtattgactgtaacgatcatgaatagtattgttgttacattgcctattttaagatcctacaatcaaaggcctctaaaccagttatgcattcagatctagctatttaatgaaaacctattctgtacaaagtgccactcatatattatttcattcatgcttcataatacatttctgatagaggcattcctagttcattttacagatggggaaactgtggactaaggttgaagaacttcccagtgtttcacagcctccaagtccaatgctgtttccacatataatactcaattttgaacattgtattgtgttaggagacttaacaaaaataaaaataaaaacaaaaaccctgcaagcagtgtatgttggtcaagagttgctgtttctctaaggtccagtaagcccttagctttgttttcctgaactttgagtttcagttgcacatcaagccccagaggtgggcaaatgctgatgctacaagaacagcagcaagtggcagcactcagggcaggagtactcatgctgttctgacattcctagccaggctgttgttcacatggagccatgcccagctcaccaaggacacctacgtctgctgacgcaagtcattcctccctgattaatgaaagtttaatgtccaaggttataaactgctgagaaggcaatagggaaagagctaatttatgagtctgcagttaccaaaatgtaagcagctctgctttagatcactgtcttggaatgagacaaactctccagctacctgtactgtgactctagacaagttacttgccctctctgaaccagagttttgttatgcataaaatgggggtaataagcgtttcttcagagagtcgctgatattggagataatttatgaaaagaaccaggtacatcatagactctcaaaaaaaggatagctattattgttgtataacaagaataattagtactagtagcatctctcagcaggtagaatgttttagctatggttctgactaccccagccctgactcctaacaactttcattacacccactctctattctttcatcaccatccacctcttgttcctccattctcctttaccaaaaatcatagaggatgaaacctcacatagccccaaagctggtcacattggtctgacaaatatggtagcaggtgcttcaatgagcccagttgaagatggggaaaccaggaaatgtgccatcagatactaagtggagtcaagggagctgataggacctttccctggtctatccctctactatcctcaggacagggcttggtgggaacttccctagccaaatgagcctcaatattgtgtttcaaatacttcaatttccttcaatattcacattcagtgatgaatacttactgttctcagaagcctttgttttcaggaaaaacttgatggtggctgaaaacatgatggctctgcttggagggaaatgcttgttttcctctctctaagtataaatgctcattcacacctttcctggctttttgagaggtggcaaaatgcccaagattgattgccagttacttgtgttacctgaatgaggcccttgtgagtctctgatctaggaaaaacaaccaaaactaaaccaaaactctttttagatcacctagttccgtttattttttccttcattttgttgacatttcaccttttcatccataaattctggtgttacactctgcacaatcaagcatcttagttttgttttccattttatgaattattccagaggaacatgttcatgagaatttacccttttttgtaattacggtcattccatcacttttagatttccctcatttatttgcctcattcatcatttgcctctggaagcatataatatttttatttaccttttctggaattaaatttgggtttcatacttaggaaaaagccctgcagaatgaacccatacccagacagtaccatatttaggggtgttgatggcttagttcaatcactttaattctagtttttaaccaaatttgaagacaaaagtacaaaggttaaaagagaatgggaatacaaaacaatgatttctggcattaaatacatcagaaagcccagctaggttttggaggactggagaagatgggagagacaatgatttttaaaaacagaatgttttgaattttatttccaatttggacaaaattcacacatgggaaattcaaggattcagaatcaatttcttttattgaaagattatttaaatttaactataaattatagaataaattgttggaattgactactaatgatatactgaagataaataatgaaaatatagcattgattacctaatttggaaataataattcttgaatgcctactgcgtacagacactatacaactcacttaatgctcctgtgaaattgagatcccactttacagagaagaaaataacggctcagacaagtaaaaaacaaaaccaaaaacccgtcaccaagttcatgtgttttgtaagtgttacagctacactaacattcttcctagtatcatttaatggaccctagagctccatcattgactagctgtatgacttaagggaacctccttatcttccttgccttagtttcctcatctgtgaaatggagggtctggattaggaactccacggtctaaagacattccttgcagctttaacattctatgagcataaggagtatatgggcatgattttaaggactggttgtttatgagccaatcagaggtgttgaataaacacctccctactaggtcaaggtagaaaggggagggcaaatattggaaaaaaaaaacatgatgagaagtctataaaaattgtgtgctaccaaagatctgtcttatttggcagctgctgcctcacccacagcttttgatatctaggaggactcttctctcccaaactgtaagtaaaaaagcttcctttgtatacctggacagcaccagtgaataaggggttaataatactactaagcttatagaagggaagattggtttgcctttgttttcgggaaaaacttgatggtggctgaaaacatgatggctctgcttggagggaaatgcttgttttcctctctctaagtataaatgctcattcacacctttcctgactttttgagaggtggcaaaatgcccaagattgattgccagttacttgtgttacctgaatgaggcccttgtgagtctctgatctaggaaaaacaacttgaacactcctatcgttaggttctaatcagtttttgagattcctgttcatttcaactctcaactctcttttcataacaactacttattttagtgatttatttacatatctactgccttatgtcattttctacattctcttcccacacctactggtaccgacactgaagtttctttgtcacagaaacaaacccttggagtattttgcccttcgccttcacccactgctcaaatgaggaaatgcaacagggttggaaacttcacagagcatagtcatcatttgattatgaatttccaaacccttcatgtttgacactttctagaacatttcctgctggccccagacactgtgaagaccctacagcttaagatagtaggaatcaaaaggttgtgtattttgatacatttgctctactatctgaaaaataggcattgtgagaatatgttgcctttttaaaaaataacttctctttaaatagttacctagggctccattagacaatttggatgcaccagagcttgaactctgctaccctgctattcatcactttagctaaggcacatctgggtagcacccaggcccaggttagagccagagatactggggcagggaatggggaaatgttgaatatctaagaggtcctttggcttcattccaagtttagaggaaagagcaccattcaggactcgttctgggctgctccgcgtgtgttaaagggcactggaaatcaggctgtcctaggactgccctagatcatcccactgcacttgtcactgggacattggggtggataatgaagctattggcagctttaagcatcatgtacaaaagtgctgcatgcagtgcctagaaatcatgggctatcaataaataagcctcctcatatttgccttaaaaatccatttgtcttgtacatagagaagcaaatgaactttctgctgccttctatttctccaggaattaaatatccatgttacaaataattatgttttcacagaacatcttcaaggaaggcagaaagaaccataccataggattctacctgctattttgctgaaggattagaaatagaattctaagtcataagccaataggatgtaacttgcaatcctagaacatcacaacttagaaggcacatcagacatagtctctctggctttagtttcctcatctctaaagtgacagggttgacgcaggtatctctgaggtcatttgtagctctgtttttctgtggttaccttctgttgttaatacaactttcctccagatttatatacatattacttgttacacatatgtaataaagtgcgtgataaagaatgtataaaatgaaatgtggccgggtgcagtggctcatgcctgtaatcccagcactttgcgaggccaaggtgggaggatcgcgtgaactcaggagttcaagacaagcctgggcaacatagcaagactttgtttataccaaaaataaaaaaaaaaatagctgggcatggtggcaggcgcctgtagtttcagctgcttggtgtctgaggtgggaagatcacttgagcccaggaggacgaggcttcagtgagtcatgattgtgccagtgcactccaggctaggcaacagagcaagactctgtctcagaaaataaaaaagaaagaaagaaaaagaaaagaaatgtgagaatctctccaccctaccccattcttcagaggtaactccagagttgttactctttgtttatatagacacaaaaacagtatgggtatatatcattttttaattaaaaaataggaggacagtatatattgcatacttctctgaaacttgtttttcatttaataatataatgtgaacaacttccatcacactgaaaaaagttggcttgagatctgagagagcagaggcttaggagtacggaaatcgttctttgtcattacccatcccaggttgtcctcctgtctccttgtggtgaacattggcctgtgaccctgttttatgattaacagagaggtgacatttgtgctaacgtggtacagacctttaatcccactgtagaagtttaactccctgtaaacagtattagtttgaattatcattttcactgttattctggttgagtcagcatacccagattgaagaaaatagtttagtaataggcagtaaacagaaaaatggaggtcacttaggtgatttttttcattaaaaaaagagaattagtaatacattgcattttatagtgctttgtaaagaatcttcatgtttatcatgcaatttaacaaatatattttgagcaactacaatgagcagggtgctcatagatggcatttgagttacctggcaaagagacaaccagaacagttattatcaccatttaatccatagtaaactgagactcaggaagctgcctgacttgcctgaggttccagctagattaggcagagctggttcttaaaactaggtctgtctgatctgctagcagcaaacctctacataaatgtgtcagatgtttatgaataagtaatgtccatggtgtaatcacccacagcgtaaggtactctggggtgtcatcaaggacattaggagtcatccaaaggccatttttttcatcaagctcactctttcccttgaatggaaaggagtactgccccttatctcaacttgatgccttattagctatttgtccttggataaataatttacactctcttatattctttcctaatctattaaatgggaggggaaaagagcccaaccaccttctgggattattttcaagaaaaattatatagtgcatgtaaagccattagcagagtgcttgacaatacatgatcacttgttgttattattattattgggctgattttcccttttgtttcattaagaaaatatctttctttcttggtaattgtcaactcctttgtacaaatgcctaaactgagagagaaagtttgcaccttgctctgaagatcacacccaggttggcttttttcagcatgatgatctggaggccaggtccaaagctaaaagtctttgactccaatattacagctaatatataaacagggcaaacatgctctgctggtggctgggacataatgggccttagaaggtcatcttctctagaaattgttgcccactagcttgtcctattaccccagtaacagcattgcagtttcattcttttggggtaagacaagaacctctgttgaaatggagaggcaacaatgagatcatcagttataccttctcatgaattagctcagtggctactgactttttatatcaagggacagagtactgacagcctaccctgaagggatgcagaaaatgtggagaaatatatttgtcatgaggacaggactggatagggactctgcttcatcctagctgggaccttgaacaagtcagttagcttctctacgtcttagcttgctcattaattaatgaagataatacctgctataattacctcattgccaatggatcagatgagacctgaggtgtccctgggcttccgggaagtaatatgtagacatggagcatccaccctgtgctgagtgtattggagggagagaagattagagaaaggaggagaccctggcattggataggaagctacccaagataatcttcattaccattttttctttggtagcccaacctatgcaaaaagcactctttgtaacacccaaagtgagggctctttgagcttgcattttcaagattaacccaaagtggcatccgaacaggggcaacgatctccttcagagcacaaccactgtggaggctgcttggttagggggtcttcaagccagagtctccccttgctaaagcagtgaagctggagcagggactgccatacaactttagcatcctcataggcagtgagaaacccaagcccagaggcacttaggaaacatcctctctggtctgccccaagtggtttcatagagggttgaatataaggaaaaggaaacttgcacccaaccctctgtagcccgaggccaaatggaagttagctttaagactatgtatagatttctcctttcaagtttgtttcctggagaataatctgttggaactacagactaacagagcaaagcagaggataactgcagaggtcaagagcgacattgtcctggcctcaagccattaaggaaatccagtggcaccaggagtccacagaatagagagacagtccattactgcagtcccctctattagtcatattttagtgggtcactaattagctggttcagtgttttgattagtgattccaaaggcctgctggaaagcattctgtctaggatcaccatgaacattcagtaacccaccttcattcattgcagctaattgcaactaataagtgatgggggaaaaacaaacctcatttgcttatccacctgtggaaatgggtcagaggtgtcacagaggtctgcacagcatgtctgcacccccaactgtcttggtcatgcatccatctgagccacccatggttctgtgcacaactctcgcacactcttttccagacctgtcaccatggcccaccgatttccagccctcacccaggagcagaagaaggagctctcagaaattgcccagagcattgttgccaatggaaaggggatcctggctgcagatgaatctgtaggtgagtgtaaaaagcagtctcatcatataacaacatattattttttctacacttagcaaaaacaacttgataatcatattctttatggaagtaaaggtttatgtacacgggagtgggagcagaagactcagtaagcgtagagcttttgagtcctgtaagtagtaggcacattcctgaaagccaaggaaagaggctcaagcccttcattttaagccaggggtcatttgaatccagccttgtagtaaggccagaaacttagtaactagcataaggtcagatacacaggcatctgctactagtgagaagtcagtttaaagtcagtttaaattcagttgagtcaagaagggcaggaaagtatctgcatctggaataggacagggcttatggatgggagaacctcaggatggcacaagggagagctgtggcagagttgcacagcctgccataaaatcacagaaccctgagaatcaagagcatgccccatccctccttctgcatgtacatccagcaagactgaggaccagatcagggaggctagagaggcctgagggccttccatatccacctggacctgagggtggcttccaccctgacctctatatgcccagcccacatactccctaactagccacctgagagcaaccagggtcttctccctggaacacaaaaaattgaagcaggagctttgactatctgaaaaaagaaagtcttgctttccactgtggtgagggtctctgagatgatgtggagaagggtgacaggaaagccctggcttgctccttatgctgcccttggccctcccaccataggtaccatggggaaccgcctgcagaggatcaaggtggaaaacactgaagagaaccgccggcagttccgagaaatcctcttctctgtggacagttccatcaaccagagcatcgggggtgtgatccttttccacgagaccctctaccagaaggacagccagggaaagctgttcagaaacatcctcaaggaaaaggggatcgtggtgggaatcaaggtgaacacctccattcacacctcacttctgctttgtcctaggcaaactccaagcacactggcaaggacagggccaacactctgaacattctcctcatcaaatttctcttctcacccttttccatcgtcatcttcccacagagaacaagatcctcttctagagttttcctccagtgccctcttctttcactcaaattttctacacgttcttaatctctttgcatctcaatctcatttcttaaaatgggaatctacctcatgatgttcttacagggatgaaatgactaaaagtttctaggctggacgtggttgcttactgctgtaatcccagcactttggaaggcagaggcaagaggatcgcttgagctcaggagtttgagaccagactgagcaacacagtgggaccttgtctctactaaaaatcaaaaacattagccagatgtgttggtgcatgcctgtagtcccagctactcaggaggctgacgtggaaagattgatcacctgagccctggaggtcgaagctggagtgagctatggtcataccactgcactccagcctggatgaccctgtctcaaaaaaaaaaagagtaagatcctgtctaaaaaaaaaaaaaaagaaagaaaaaagaaaagaaaaagtttatattgcgtaattattgttaatggtaactatcataattattgaagcatttactattctatcttataactaggtcttccaatagtgcataaacttctcaaaagtgaaaactagtatccattgaataagagtttttaccattccaagcattcatttaattctcataacctctggtagtagactcaattattacccttatttagagatgaagtgagaaaactgaactacgaagagtaacataacttgcccacacaacaaggcaaggtcagagccagtttaggctaattctcaagctcatgacttttgcctttgctatgtagagagtagaggttgtatccttaattctctttacctcctgtactaacacaacacctggtgcatgcaggtgctcaataaatgttagggtagacactctcacagtgtaccttctaggtaacttcccttctgctatggactgaactgggtccctcgcactaatacactttactaattcaactccttgatctgtaaaagatgcaaactgttagttagttcaagagttctgcttgtgttttcctgacatctgacacctgttaattatttgtatccacagttagaccaaggaggtgctcctcttgcaggaacaaacaaagaaaccaccattcaaggtaaggatattgcccactgagatgaatcatgccagtgtaagctagaaatgaaggcaagtaaagaaggaagcaaggaaaaacaaaacacaactattacactggtcttagagccacacgtacctggttttcaataccagctcctccatttaacaactgtgaccttgggccagtcactgaaatattgtgagcctcagttctcctatctcaaaatggggatttctcaaaatgttgtggggattaacttagacaatgtacataaggtgcttaccacagtaccttggacaaagaagattaaactctgcacccggaagtattatttttagaaaaaaattagcagcagtagagtggaaagtccccacactttgaggtcagacacacctgggtttgaatcctggttctatcacatgctacctagataattttgcaaggtacttctgcccaagtagacaagcattaactcacaacattgggttagctaagcagaatttgaatcccagctctgtcactcttgagcaattcaaacttggtaaagttgcttaaccattaggagcttcagtttccacctttgtaaaatgagtatcatattaactattggtttcttctattctatatatggagtagatagtatgtatgtcaaaacactatttattaaatctaagtcttctggttcagtgttgtgattaatgctgatatgcttggctgttttcaatcctcaagcacagtggattgaaagctaagcaaagggagaactccttccctttattagaagccccatggatcaggtacaaaggtacaaagaagcctttctctcttttgtgacttgcagggcttgatggcctctcagagcgctgtgctcagtacaagaaagatggtgttgactttgggaagtggcgtgctgtgctgaggattgccgaccagtgtccatccagcctcgctatccaggaaaacgccaacgccctggctcgctacgccagcatctgtcagcaggtgctctgccttccccttgggctgaaaaagagtaggctagagttttcttcagagcttttcttttcaattatactataactacaaatggacctccttttccctcaccagtatatcctagtggcatttttcacaacttttgctatagccaactgtggtagggaaagatttggtcccacaagccagtaggagtccaactaagctatgagttcaaaggataatgccatcaactgctgccctctgtcaaagctccataagctgtcttataagtgatcgggcttttgagggcagggaacttggttgtctatactccgtaacatccaagacatgatcctcttagattcctagctgaagagtgacagctctgaccgagttccaatccaaataattctttggaggatggtgaccagatgctaaagtttccaacacatactaaaatgtctctgggtccgagttaagtttgattttcttctgtgagtactatgttggggttactagagttgtggacagctggagatccccaattagaactctaaacactgcttgaatttcttcattaacccaacttagagacatctttcttaatgatttatgcttagatgccctaaaaaggcagtagctaggttctgaggcagctagaataatctctagaaagaaatacagtaattacgggtttgtatttattttttatctcattctgaaaaattctactgtctttaagtcatctatgtagtatttctccataatggcttcaatttataccaattgcaactgttgaatctcctcctaaggaaaggataacagtgagcacagcttcacttttgcttccttgattttcctttttagaatggactggtacctattgttgaaccagaggtaattcctgatggagaccatgacctggaacactgccagtatgttactgagaaggtaagttttaaatatgaaggccccaattctagttgaaaaatcttagttttaggtaacagctgttacttaacatataacagctgttatatctgaagtagcctttaggatggatagcatagagaaggtagggaggtgctcatcagcccttcacctttttggcacatggtatactccatatagaaaaagcacaggagttgcagtaccaagacttgggttggagaatccgcttttccacttgtgggatcttgggcaagtcatattatctcttttgacttcaattcaattacatgtacacaaagaaattttaaaataagacatgtggctcaaatgagaagatgtaattagaaagtactttattccatctgactttctaaattagccacagtggatctgaaagagggtggttctattcatacactgtgagaaagtaggagagtcataatgtcacctgaccttagtttctctacttggaaaattatgtggactgaaatgcaatctaagagcacttccacctctaaaatgtatgattctatgactactcagcttctgtaaacatggacagtggaggcccgtttagatgaccccaaatagctaaagcaatgcagtctcaataaggaatgacattgaccaagggagtaatggaaataaaggaatgaagggcttctaggaagcagagccatgcctgtcattcatgcagtgaatgagaagctagattaggggtgatgaagacaggccagtttagttgtgctcagtggctatggattgcaacacattggtctaatgaggcctggagattggttcagaagcttttgccaagcaacaaataagaattccttcatcctgcctccctgcagtgtaaatgtgccaaggtcaagtggctctatgactagctttgagtttcacctggtgggacctcttgtccttcaggtcctggctgctgtctacaaggccctgaatgaccatcatgtttacctggagggcaccctgctaaagcccaacatggtgactgctggacatgcctgcaccaagaagtatactccagaacaagtagctatggccaccgtaacagctctccaccgtactgttcctgcagctgttcctggtaaggccttctttcttctctaactcaaggtcttagccctcattctttggagagccacaagctttctgtttgtccagaaatctgcttctattcatgaaacaaacctctgttatctcacaggcagccagcacttcttctcccacttcagaataccaagcatcccaagtctgcccaaatgcccacaatccatgtatttcttcaacatttcactgccttccttacgtatttaaagcacttatctctagcccaactagcttcagcaaaagcaaactgatttctcagtttgctttaaggcaaattaagcagagaaaagactgagacattacttttctggtaggttcattgcttgctttctcaagcagggtatataaggtgggactaatagagtgaaatggcttctctcctaccaggcatctgctttttgtctggtggcatgagtgaagaggatgccactctcaacctcaatgctatcaacctttgccctctaccaaagccctggaaactaagtttctcttatggacgggccctgcaggccagtgcactggctgcctggggtggcaaggctgcaaacaaggaggcaacccaggaggcttttatgaagcgggccatggtaagatgctgccacctcttatctacttgatgatgttcacatttggggcttgactttccaacacggagaagcattgttttctttgggccaagaaggtatctaccgatagtgtctattaggcatttgaaaatgtggcagtagaggtcagtatgaggattgaggctagagagaattttgaattatccacactagagtatagttgatgacaggagactgaaggacaatttcaacagaaacacttcagagggaaggagataagaggaccaagaactgaacctaggatactttttattttgggaagatgaagaagagaagcaaccaagaaaagcagcgattatattgtagggtgaaccaagcattctgggaataaagacagaagaatttctttctttcatgtttatttgtttgtttgtttgtttgttttgagatggagtgttactctgtcacccaggctggagtacagtggcacaatctcggctcactgcaacctccacctcctggattcaagcaattcttctgcctcagcctcccaagtagctgggactagaggcatgcgccaccatacctggctaatttctgtatattttagtaaagatggggtttcaccatgttggccaggctagtctcaaactcctgacctcaggtgatctgcccacctcaacctcccaaagtgctgagattacagacatgagccaccacacccagccgggtaaacaatttcaaagggccaataataacatgctatagagagattcaaaagaaaggccaagaaaagaccctgagattggcatttaggagcataccagtgaccctcactgaaacagtttcaataaagaggaaaggaaaggtgcccactcaagaagtttttcagaaaaagacccagaaaggttgccaggagaaatgaggaccaacaaagtttttattcaaataataaccaaaatttttaaaatacgctttatgagccaagaactggggtgaacaaatgagacatagccatgtcctccaggaagcttggagtttagccaaataggagagagcttggcatgtttaaatgtaaagaaagaggagccagaggagacagtaaagatgaggagagtggggataattgagtggagaagaacttagaggagcaggactgcatgagactcaatattaagcataggtggcacagctggtgtaagacaaaaaggagggaagaggcagaaaagagaatacagttggaatcagctctatataagtcaagagatgtagcagttgatgactgattacagttgagggtatctgctgagaatgatgaagaaatggaaatttcaatactgacagtcggaaagcgtagaaaagcagttaaaggaacttgctaggaaattgatcggacgttatggccagacatagccaagcatcaggtaatgtgcagctgaaataagagtgagtgtgtggtagcttcattcctgagttttcctaacagcagtctaaagcatgcaggaagattcagaacgcaaaatagcggggtagaagagtgaaagtttaataggaaggtagaagagtgacaaattttaccgatagcctctgttagcttgctgaccatagaggaagctaggcaaggaatcaagagtagtcagaagtgtggtgatgaggccctaaagggaaggaaggccccagggaagctaaatcatcatctcacaggcataagagaggtatcagattttcaaagtagtgctttaccttgactgtggaaagcagggtgcagcagtgctgctgtgtggctgatggactgaggagacctagcttacatgatggagggattgtgaaagcgcaggtcatcagggacatccacacagaagaagggaagctgagtttatcatcaaggatggtgcttcccaagctccagtgtggatctgaatcacctgaaggtgattttggttttgttgtcatgatcttttatatttacacacaataattgtatagatctgtggggtatctgtgattttttatatatgcatataatgtataatgatcaaatcaggataattagggtattcactccaaatatttattatttctttgggtttggaacattccaaatcttctcttccagctattttaaaatatgtaataaatcattgttaactatagtcatcttactgttgtatcaaacactagaacttattccttctgcctaactgtatttttgtacccattaccaacctcttttcatttcccctacccccacttgaagcgcttgttaaaaatgcagattatgggtctcacccactgagtttctaattcagtaggtcaggggtaaggccagggaatttctatttttaacatgttcctaagggatgctggtagaccatgaaacacagttggagaaccattgatgtaaaatgtagaaataagtcctggagagaacagacaatagcaacactgactggaagaagtggtaccactgagtgacattcaaatattgtcgtaagtttcataattctgaatttatctttaactggaatgtatacaggaaagcaaatgatactacaataactaaataaaaattacatattcttctagaccaatataggtagaaaatggaaatgtttttaaaataaacatgtttttcttttggtatagtgtactatactagtgagaaatttttcaactttagtttctagtactgttgctgcaatattgttggtactgaacagagatttccccagtaactgacacaaacctcaagcttaccaaagaaatgctcagaaaactgggataaaaaggggagatactttatagaaggggatggtatccccagcaatattcagcaacattgctgtaaaaagaagaaaatctgagtgaaggtttgactggtttcccatgagaggcagacagggtcaaggtggggtcacatttactctaaccagtctcctctctcatatttgtcttctaggctaactgccaggcggccaaaggacagtatgttcacacgggttcttctggggctgcttccacccagtcgctcttcacagcctgctatacctactagggtccaatgcccgccagcctagctccagtgcttctagtaggagggctgaaagggagcaacttttcctccaatcctggaaattcgacacaattagatttgaactgctggaaatacaacacatgttaaatcttaagtacaagggggaaaaaataaatcagttattgaaacataaaaatgaataccaaggacctgatcaaatttcacacagcagtttccttgcaacactttcagctccccatgctccagaatacccacccaagaaaataataggctttaaaacaatatcggctcctcatccaaagaacaactgctgattgaaacacctcattagctgagtgtagagaagtgcatcttatgaaacagtcttagc

SEQ ID NO: 74 - RNA, 1612 nt, Homo sapiens
  source 1..1612: mol_type = other RNA
gcacaggacaattgtgcttgctcttggaaggtcacatggatttgactgtggctctgctcactgatgcgcagcaagtgttggctcccaccgcctccagaatccaactcactggacaccgctgcctcttcggccaccagacctgtcaccatggcccaccgatttccagccctcacccaggagcagaagaaggagctctcagaaattgcccagagcattgttgccaatggaaaggggatcctggctgcagatgaatctgtaggtaccatggggaaccgcctgcagaggatcaaggtggaaaacactgaagagaaccgccggcagttccgagaaatcctcttctctgtggacagttccatcaaccagagcatcgggggtgtgatccttttccacgagaccctctaccagaaggacagccagggaaagctgttcagaaacatcctcaaggaaaaggggatcgtggtgggaatcaagttagaccaaggaggtgctcctcttgcaggaacaaacaaagaaaccaccattcaagggcttgatggcctctcagagcgctgtgctcagtacaagaaagatggtgttgactttgggaagtggcgtgctgtgctgaggattgccgaccagtgtccatccagcctcgctatccaggaaaacgccaacgccctggctcgctacgccagcatctgtcagcagaatggactggtacctattgttgaaccagaggtaattcctgatggagaccatgacctggaacactgccagtatgttactgagaaggtcctggctgctgtctacaaggccctgaatgaccatcatgtttacctggagggcaccctgctaaagcccaacatggtgactgctggacatgcctgcaccaagaagtatactccagaacaagtagctatggccaccgtaacagctctccaccgtactgttcctgcagctgttcctggcatctgctttttgtctggtggcatgagtgaagaggatgccactctcaacctcaatgctatcaacctttgccctctaccaaagccctggaaactaagtttctcttatggacgggccctgcaggccagtgcactggctgcctggggtggcaaggctgcaaacaaggaggcaacccaggaggcttttatgaagcgggccatggctaactgccaggcggccaaaggacagtatgttcacacgggttcttctggggctgcttccacccagtcgctcttcacagcctgctatacctactagggtccaatgcccgccagcctagctccagtgcttctagtaggagggctgaaagggagcaacttttcctccaatcctggaaattcgacacaattagatttgaactgctggaaatacaacacatgttaaatcttaagtacaagggggaaaaaataaatcagttattgaaacataaaaatgaataccaaggacctgatcaaatttcacacagcagtttccttgcaacactttcagctccccatgctccagaatacccacccaagaaaataataggctttaaaacaatatcggctcctcatccaaagaacaactgctgattgaaacacctcattagctgagtgtagagaagtgcatcttatgaaacagtcttagc

SEQ ID NO: 75 - RNA, 2420 nt, Homo sapiens
  source 1..2420: mol_type = other RNA
cttatttggcagctgctgcctcacccacagcttttgatatctaggaggactcttctctcccaaactacctgtcaccatggcccaccgatttccagccctcacccaggagcagaagaaggagctctcagaaattgcccagagcattgttgccaatggaaaggggatcctggctgcagatgaatctgtaggtaccatggggaaccgcctgcagaggatcaaggtggaaaacactgaagagaaccgccggcagttccgagaaatcctcttctctgtggacagttccatcaaccagagcatcgggggtgtgatccttttccacgagaccctctaccagaaggacagccagggaaagctgttcagaaacatcctcaaggaaaaggggatcgtggtgggaatcaagttagaccaaggaggtgctcctcttgcaggaacaaacaaagaaaccaccattcaagggcttgatggcctctcagagcgctgtgctcagtacaagaaagatggtgttgactttgggaagtggcgtgctgtgctgaggattgccgaccagtgtccatccagcctcgctatccaggaaaacgccaacgccctggctcgctacgccagcatctgtcagcagaatggactggtacctattgttgaaccagaggtaattcctgatggagaccatgacctggaacactgccagtatgttactgagaaggtcctggctgctgtctacaaggccctgaatgaccatcatgtttacctggagggcaccctgctaaagcccaacatggtgactgctggacatgcctgcaccaagaagtatactccagaacaagtagctatggccaccgtaacagctctccaccgtactgttcctgcagctgttcctggcatctgctttttgtctggtggcatgagtgaagaggatgccactctcaacctcaatgctatcaacctttgccctctaccaaagccctggaaactaagtttctcttatggacgggccctgcaggccagtgcactggctgcctggggtggcaaggctgcaaacaaggaggcaacccaggaggcttttatgaagcgggccatggctaactgccaggcggccaaaggacagtatgttcacacgggttcttctggggctgcttccacccagtcgctcttcacagcctgctatacctactagggtccaatgcccgccagcctagctccagtgcttctagtaggagggctgaaagggagcaacttttcctccaatcctggaaattcgacacaattagatttgaactgctggaaatacaacacatgttaaatcttaagtacaagggggaaaaaataaatcagttattgaaacataaaaatgaataccaaggacctgatcaaatttcacacagcagtttccttgcaacactttcagctccccatgctccagaatacccacccaagaaaataataggctttaaaacaatatcggctcctcatccaaagaacaactgctgattgaaacacctcattagctgagtgtagagaagtgcatcttatgaaacagtcttagcagtggtaggttgggaaggagatagctgcaaccaaaaaagaaataaatattctataaaccttcagctgctatcgggtttcacttttctgctcttgctgtccaaagactcagtgtatttcattacttttgactctactagacatgactgggtttcaacagtaaaggtcttcaactcttgctagtcattggaatcaagccgcaaaattttaaaaactgagatgctcaggccacaccccagctcaattaaatcagaaaccctagacttgggatcctctaactattagatttcttaaagctccctcagtaattccaatgtacagtcaagtttgagaactaccaatctaaatttcaagtttgagggtatttgaaaattaaagccattcacaatacgaagccagctaaaaatgtagaatgattttgagcaacttgtggagtataataagagaattaatgtgacttcaatgcttggagcattcttgttcaagtggcccaggtttggtgaaacaggactaccttgtcatctgcacgtccaggcatatttcgtagttttgcagtaaataatattcacataatgatactgtattgactttcaattttcagaattaacctatagttacagcacttaagacaaccagagttataaaagagaatttaaatattataactttggacaatataaaagtgatgatttaactgacagaagctaggaaatataagggggaggagaagtggaagaaagcaaagagagtcaggaatactacttaaaactgatgggttaagaaatagtgctttaattctatttaagtaataaaagaaatggatgtaaatcataaaaatatatatctaaaattaaaatattgatggtagtatgctaaatttc

SEQ ID NO: 76 - RNA, 1391 nt, Homo sapiens
  source 1..1391: mol_type = other RNA
cttatttggcagctgctgcctcacccacagcttttgatatctaggaggactcttctctcccaaactacctgtcaccatggcccaccgatttccagccctcacccaggagcagaagaaggagctctcagaaattgcccagagcattgttgccaatggaaaggggatcctggctgcagatgaatctgtaggtaccatggggaaccgcctgcagaggatcaaggtggaaaacactgaagagaaccgccggcagttccgagaaatcctcttctctgtggacagttccatcaaccagagcatcgggggtgtgatccttttccacgagaccctctaccagaaggacagccagggaaagctgttcagaaacatcctcaaggaaaaggggatcgtggtgggaatcaagttagaccaaggaggtgctcctcttgcaggaacaaacaaagaaaccaccattcaagggcttgatggcctctcagagcgctgtgctcagtacaagaaagatggtgttgactttgggaagtggcgtgctgtgctgaggattgccgaccagtgtccatccagcctcgctatccaggaaaacgccaacgccctggctcgctacgccagcatctgtcagcagaatggactggtacctattgttgaaccagaggtaattcctgatggagaccatgacctggaacactgccagtatgttactgagaaggtcctggctgctgtctacaaggccctgaatgaccatcatgtttacctggagggcaccctgctaaagcccaacatggtgactgctggacatgcctgcaccaagaagtatactccagaacaagtagctatggccaccgtaacagctctccaccgtactgttcctgcagctgttcctggcatctgctttttgtctggtggcatgagtgaagaggatgccactctcaacctcaatgctatcaacctttgccctctaccaaagccctggaaactaagtttctcttgggtggcaaggctgcaaacaaggaggcaacccaggaggcttttatgaagcgggccatggctaactgccaggcggccaaaggacagtatgttcacacgggttcttctggggctgcttccacccagtcgctcttcacagcctgctatacctactagggtccaatgcccgccagcctagctccagtgcttctagtaggagggctgaaagggagcaacttttcctccaatcctggaaattcgacacaattagatttgaactgctggaaatacaacacatgttaaatcttaagtacaagggggaaaaaataaatcagttattgaaacataaaaatgaataccaaggacctgatcaaatttcacacagcagtttccttgcaacactttcagctccccatgctccagaatacccaccc

SEQ ID NO: 77 - RNA, 1444 nt, Homo sapiens
  source 1..1444: mol_type = other RNA
aggcttccaggaaagtgtagttctggatttggtcaggctggcattcttcattcctaaagggtgctgaagtgagatgcaggaaatccaaatagctggaggaaaagaggcaggatattagaactacctgtttcttccatacataccagcattctgaagatttctagacctgtcaccatggcccaccgatttccagccctcacccaggagcagaagaaggagctctcagaaattgcccagagcattgttgccaatggaaaggggatcctggctgcagatgaatctgtaggtaccatggggaaccgcctgcagaggatcaaggtggaaaacactgaagagaaccgccggcagttccgagaaatcctcttctctgtggacagttccatcaaccagagcatcgggggtgtgatccttttccacgagaccctctaccagaaggacagccagggaaagctgttcagaaacatcctcaaggaaaaggggatcgtggtgggaatcaagttagaccaaggaggtgctcctcttgcaggaacaaacaaagaaaccaccattcaagggcttgatggcctctcagagcgctgtgctcagtacaagaaagatggtgttgactttgggaagtggcgtgctgtgctgaggattgccgaccagtgtccatccagcctcgctatccaggaaaacgccaacgccctggctcgctacgccagcatctgtcagcagaatggactggtacctattgttgaaccagaggtaattcctgatggagaccatgacctggaacactgccagtatgttactgagaaggtcctggctgctgtctacaaggccctgaatgaccatcatgtttacctggagggcaccctgctaaagcccaacatggtgactgctggacatgcctgcaccaagaagtatactccagaacaagtagctatggccaccgtaacagctctccaccgtactgttcctgcagctgttcctggcatctgctttttgtctggtggcatgagtgaagaggatgccactctcaacctcaatgctatcaacctttgccctctaccaaagccctggaaactaagtttctcttatggacgggccctgcaggccagtgcactggctgcctggggtggcaaggctgcaaacaaggaggcaacccaggaggcttttatgaagcgggccatggctaactgccaggcggccaaaggacagtatgttcacacgggttcttctggggctgcttccacccagtcgctcttcacagcctgctatacctactagggtccaatgcccgccagcctagctccagtgcttctagtaggagggctgaaagggagcaacttttcctccaatcctggaaattcgacacaattagatttgaactgctggaaatacaacacatgttaaatcttaagtacaagggggaaaaaataaatcagttattgaaacataaaaa

SEQ ID NO: 78 - RNA, 1408 nt, Homo sapiens
  source 1..1408: mol_type = other RNA
tcttttccagacctgtcaccatggcccaccgatttccagccctcacccaggagcagaagaaggagctctcagaaattgcccagagcattgttgccaatggaaaggggatcctggctgcagatgaatctgtaggtaccatggggaaccgcctgcagaggatcaaggtggaaaacactgaagagaaccgccggcagttccgagaaatcctcttctctgtggacagttccatcaaccagagcatcgggggtgtgatccttttccacgagaccctctaccagaaggacagccagggaaagctgttcagaaacatcctcaaggaaaaggggatcgtggtgggaatcaagttagaccaaggaggtgctcctcttgcaggaacaaacaaagaaaccaccattcaagggcttgatggcctctcagagcgctgtgctcagtacaagaaagatggtgttgactttgggaagtggcgtgctgtgctgaggattgccgaccagtgtccatccagcctcgctatccaggaaaacgccaacgccctggctcgctacgccagcatctgtcagcagaatggactggtacctattgttgaaccagaggtaattcctgatggagaccatgacctggaacactgccagtatgttactgagaaggtcctggctgctgtctacaaggccctgaatgaccatcatgtttacctggagggcaccctgctaaagcccaacatggtgactgctggacatgcctgcaccaagaagtatactccagaacaagtagctatggccaccgtaacagctctccaccgtactgttcctgcagctgttcctggcatctgctttttgtctggtggcatgagtgaagaggatgccactctcaacctcaatgctatcaacctttgccctctaccaaagccctggaaactaagtttctcttatggacgggccctgcaggccagtgcactggctgcctggggtggcaaggctgcaaacaaggaggcaacccaggaggcttttatgaagcgggccatggtaagatgctgccacctcttatctacttgatgatgttcacatttggggcttgactttccaacacggagaagcattgttttctttgggccaagaaggtatctaccgatagtgtctattaggcatttgaaaatgtggcagtagaggtcagtatgaggattgaggctagagagaattttgaattatccacactagagtatagttgatgacaggagactgaaggacaatttcaacagaaacacttcagagggaaggagataagaggaccaagaactgaacctaggatactttttattttgggaagatgaagaagagaagcaaccaagaaaagcagcgattatattgtagggtgaaccaagcattctgggaataaagacagaagaatttctttc

SEQ ID NO: 79 - RNA, 1611 nt, Homo sapiens
  source 1..1611: mol_type = other RNA
agctgctgcctcacccacagcttttgcatatctaggaggactcttctctcccaaactacctgtcacatggcccaccgatttccagccctcacccaggagcagaagaaggagctctcagaaattgcccagagcattgttgccaatggaaaggggatcctggctgcagatgaatctgtaggtaccatggggaaccgcctgcagaggatcaaggtggaaaacactgaagagaaccgccggcagttccgagaaatcctcttctctgtggacagttccatcaaccagagcatcgggggtgtgatccttttccacgagaccctctaccagaaggacagccagggaaagctgttcagaaacatcctcaaggaaaaggggatcgtggtgggaatcaagttagaccaaggaggtgctcctcttgcaggaacaaacaaagaaaccaccattcaagggcttgatggcctctcagagcgctgtgctcagtacaagaaagatggtgttgactttgggaagtggcgtgctgtgctgaggattgccgaccagtgtccatccagcctcgctatccaggaaaacgccaacgccctggctcgttacgccagcatctgtcagcagaatggactggtacctattgttgaaccagaggtaattcctgatggagaccatgacctggaacactgccagtatgttactgagaaggtcctggctgctgtctacaaggccctaaatgaccatcatgtttacctggagggcaccctgctaaagcccaacatggtgactgctggacatgcctgcaccaagaagtatactccagaacaagtagctatggccaccgtaacagctctccaccgtactgttcctgcagctgttcctggcatctgctttttgtctggtggcatgagtgaagaggatgccactctcaacctcaatgctatcaacctttgccctctaccaaagccctggaaactaagtttctcttatggacgggccctgcaggccagtgcactggctgcctggggtggcaaggctgcaaacaaggaggcaacccaggaggcttttatgaagcgggccatggctaactgccaggcggccaaaggacagtatgttcacacgggttcttctggggctgcttccacccagtcgctcttcacagcctgctatacctactagggtccaatgcccgccagcctagctccagtgcttctagtaggagggctgaaagggagcaacttttcctccaatcctggaaattcgacacaattagatttgaactgctggaaatacaacacatgttaaatcttaagtacaagggggaaaaaataaatcagttattgaaacataaaaatgaataccaaggacctgatcaaatttcacacagcgagtttccttgcaacactttcagctccccatgctccagaatacccacccaagaaaataaccgggatctaaaacaataatcggctcctcatccaaagaacaactgctgattgaaacacctcattagctgatgtagagaagtgcatcttatgaaacagtcttagcagtggtaggttgggaaggagatagctgcaaccaaaaaagaaataaatattctataaaccttcaaaaaaaaaaaaaaaa

SEQ ID NO: 80 - RNA, 1652 nt, Homo sapiens
  source 1..1652: mol_type = other RNA
aaaaacatgatgagaagtctataaaaattgtgtgctaccaaagatctgtcttatttggcagctgctgcctcacccacagcttttgatatctaggaggactcttctctcccaaactacctgtcaccatggcccaccgatttccagccctcacccaggagcagaagaaggagctctcagaaattgcccagagcattgttgccaatggaaaggggatcctggctgcagatgaatctgtaggtaccatggggaaccgcctgcagaggatcaaggtggaaaacactgaagagaaccgccggcagttccgagaaatcctcttctctgtggacagttccatcaaccagagcatcgggggtgtgatccttttccacgagaccctctaccagaaggacagccagggaaagctgttcagaaacatcctcaaggaaaaggggatcgtggtgggaatcaagttagaccaaggaggtgctcctcttgcaggaacaaacaaagaaaccaccattcaagggcttgatggcctctcagagcgctgtgctcagtacaagaaagatggtgttgactttgggaagtggcgtgctgtgctgaggattgccgaccagtgtccatccagcctcgctatccaggaaaacgccaacgccctggctcgctacgccagcatctgtcagcagaatggactggtacctattgttgaaccagaggtaattcctgatggagaccatgacctggaacactgccagtatgttactgagaaggtcctggctgctgtctacaaggccctgaatgaccatcatgtttacctggagggcaccctgctaaagcccaacatggtgactgctggacatgcctgcaccaagaagtatactccagaacaagtagctatggccaccgtaacagctctccaccgtactgttcctgcagctgttcctggcatctgctttttgtctggtggcatgagtgaagaggatgccactctcaacctcaatgctatcaacctttgccctctaccaaagccctggaaactaagtttctcttatggacgggccctgcaggccagtgcactggctgcctggggtggcaaggctgcaaacaaggaggcaacccaggaggcttttatgaagcgggccatggctaactgccaggcggccaaaggacagtatgttcacacgggttcttctggggctgcttccacccagtcgctcttcacagcctgctatacctactagggtccaatgcccgccagcctagctccagtgcttctagtaggagggctgaaagggagcaacttttcctctaatcctggaaattcgacacaattagatttgaactgctggaaatacaacacatgttaaatcttaagtacaagggggaaaaaataaatcagttattgaaacataaaaatgaataccaaggacctgatcaaatttcacacagcagtttccttgcaacactttcagctccccatgctccagaatacccacccaagaaaataataggctttaaaacaatatcggctcctcatccaaagaacaactgctgattgaaacacctcattagctgagtgtagagaagtgcatcttatgaaacagtcttagcagtggtaggttgggaaggagatagctgcaaccaaaaaagaaataaatattctataaaccttc

SEQ ID NO: 81 - RNA, 1569 nt, Homo sapiens
  source 1..1569: mol_type = other RNA
cttatttggcagctgctgcctcacccacagcttttgatatctaggaggactcttctctcccaaactacctgtcaccatggcccaccgatttccagccctcacccaggagcagaagaaggagctctcagaaattgcccagagcattgttgccaatggaaaggggatcctggctgcagatgaatctgtaggtaccatggggaaccgcctgcagaggatcaaggtggaaaacactgaagagaaccgccggcagttccgagaaatcctcttctctgtggacagttccatcaaccagagcatcgggggtgtgatccttttccacgagaccctctaccagaaggacagccagggaaagctgttcagaaacatcctcaaggaaaaggggatcgtggtgggaatcaagttagaccaaggaggtgctcctcttgcaggaacaaacaaagaaaccaccattcaagggcttgatggcctctcagagcgctgtgctcagtacaagaaagatggtgttgactttgggaagtggcgtgctgtgctgaggattgccgaccagtgtccatccagcctcgctatccaggaaaacgccaacgccctggctcgctacgccagcatctgtcagcagaatggactggtacctattgttgaaccagaggtaattcctgatggagaccatgacctggaacactgccagtatgttactgagaaggtcctggctgctgtctacaaggccctgaatgaccatcatgtttacctggagggcaccctgctaaagcccaacatggtgactgctggacatgcctgcaccaagaagtatactccagaacaagtagctatggccaccgtaacagctctccaccgtactgttcctgcagctgttcctggcatctgctttttgtctggtggcatgagtgaagaggatgccactctcaacctcaatgctatcaacctttgccctctaccaaagccctggaaactaagtttctcttatggacgggccctgcaggccagtgcactggctgcctggggtggcaaggctgcaaacaagaaggcaacccaggaggcttttatgaagcgggccatggctaactgccaggcggccaaaggacagtatgttcacacgggttcttctggggctgcttccacccagtcgctcttcacagcctgctatacctactagggtccaatgcccgccagcctagctccagtgcttctagtaggagggctgaaagggagcaacttttcctctaatcctggaaattcgacacaattagatttgaactgctggaaatacaacacatgttaaatcttaagtacaagggggaaaaaataaatcagttattgaaacataaaaatgaataccaaggacctgatcaaatttcacacagcagtttccttgcaacactttcagctccccatgctccagaatacccacccaagaaaataataggctttaaaacaatatcggctcctcatccaaagaacaactgctgattgaaacacctcattagctgagtgtagagaagtgcatcttatgaaacagtcttagcagtggtaggttgggaaggagatagctgc

SEQ ID NO: 82 - RNA, 1422 nt, Homo sapiens
  source 1..1422: mol_type = other RNA
cttatttggcagctgctgcctcacccacagcttttgatatctaggaggactcttctctcccaaactacctgtcaccatggcccaccgatttccagccctcacccaggagcagaagaaggagctctcagaaattgcccagagcattgttgccaatggaaaggggatcctggctgcagatgaatctgtaggtaccatggggaaccgcctgcagaggatcaaggtggaaaacactgaagagaaccgccggcagttccgagaaatcctcttctctgtggacagttccatcaaccagagcatcgggggtgtgatccttttccacgagaccctctaccagaaggacagccagggaaagctgttcagaaacatcctcaaggaaaaggggatcgtggtgggaatcaagttagaccaaggaggtgctcctcttgcaggaacaaacaaagaaaccaccattcaagggcttgatggcctctcagagcgctgtgctcagtacaagaaagatggtgttgactttgggaagtggcgtgctgtgctgaggattgccgaccagtgtccatccagcctccctatccaggaaaacgccaacgccctggctcgctacgccagcatctgtcagcagaatggactggtacctattgttgaaccagaggtaattcctgatggagaccatgacctggaacactgccagtatgttactgagaaggtcctggctgctgtctacaaggccctgaatgaccatcatgtttacctggagggcaccctgctaaagcccaacatggtgactgctggacatgcctgcaccaagaagtatactccagaacaagtagctatggccaccgtaacagctctccaccgtactgttcctgcagctgttcctggcatctgctttttgtctggtggcatgagtgaagaggatgccaccctcaacctcaatgctatcaacctttgccctctaccaaagccctggaaactaagtttctctggggtggcaaggctgcaaacaaggaggcaacccaggaggcttttatgaagcgggccatggctaactgccaggcggccaaaggacagtatgttcacacgggttcttctggggctgcttccacccagtcgctcttcacagcctgctatacctactagggtccaatgcccgccagcctagctccagtgcttctagtaggagggctgaaagggagcaacttttcctccaatcctggaaattcgacacaattagatttgaactgctggaaatacaacacatgttaaatcttaagtacaagggggaaaaaataaatcagttgttgaaacataaaaatgaataccaaggacctgatcaaatttcacacagcagtttccttgcaacactttcagctccccatgctccagaatacccacccaaaaaaaaaaaaaaaaaaaaaaaaaaaaaaa

SEQ ID NO: 83 - RNA, 571 nt, Homo sapiens
  source 1..571: mol_type = other RNA
catgcctgcaccaagaagtatactccagaacaagtagatatggccaccgtaacagctctccaccgtactgttcctgcagctgttcctggcatctgctttttgtctggtggcatgagtgaagaggatgccactctcaacctcaatgctatcaacctttgccctctaccaaagccctggaaactaagtttctcttatggacgggccctgcaggccagtgcactggctgcctggggtggcaaggctgcaaacaaggaggcaacccaggaggcttttatgaagcgggccatggctaactgccaggcggccaaaggacagtatgttcacacgggttcttctggggctgcttccacccagtcgctcttcacagcctgctatacctactagggtccaatgcccgccagcctagctccagtgcttctagtaggagggctgaaagggagcaacttttcctccaatcctggaaattcgacacaattagatttgaactgctggaaatacaacacatgttaaatcttaagtacaagggggaaaaaataaatcagttattgaaacataaaaatgaataccaagg

SEQ ID NO: 84 - RNA, 1612 nt, Homo sapiens; identical to SEQ ID NO: 74
  source 1..1612: mol_type = other RNA

SEQ ID NO: 85 - RNA, 2451 nt, Homo sapiens
  source 1..2451: mol_type = other RNA
aaaaacatgatgagaagtctataaaaattgtgtgctaccaaagatctgtcttatttggcagctgctgcctcacccacagcttttgatatctaggaggactcttctctcccaaactacctgtcaccatggcccaccgatttccagccctcacccaggagcagaagaaggagctctcagaaattgcccagagcattgttgccaatggaaaggggatcctggctgcagatgaatctgtaggtaccatggggaaccgcctgcagaggatcaaggtggaaaacactgaagagaaccgccggcagttccgagaaatcctcttctctgtggacagttccatcaaccagagcatcgggggtgtgatccttttccacgagaccctctaccagaaggacagccagggaaagctgttcagaaacatcctcaaggaaaaggggatcgtggtgggaatcaagttagaccaaggaggtgctcctcttgcaggaacaaacaaagaaaccaccattcaagggcttgatggcctctcagagcgctgtgctcagtacaagaaagatggtgttgactttgggaagtggcgtgctgtgctgaggattgccgaccagtgtccatccagcctcgctatccaggaaaacgccaacgccctggctcgctacgccagcatctgtcagcagaatggactggtacctattgttgaaccagaggtaattcctgatggagaccatgacctggaacactgccagtatgttactgagaaggtcctggctgctgtctacaaggccctgaatgaccatcatgtttacctggagggcaccctgctaaagcccaacatggtgactgctggacatgcctgcaccaagaagtatactccagaacaagtagctatggccaccgtaacagctctccaccgtactgttcctgcagctgttcctggcatctgctttttgtctggtggcatgagtgaagaggatgccactctcaacctcaatgctatcaacctttgccctctaccaaagccctggaaactaagtttctcttatggacgggccctgcaggccagtgcactggctgcctggggtggcaaggctgcaaacaaggaggcaacccaggaggcttttatgaagcgggccatggctaactgccaggcggccaaaggacagtatgttcacacgggttcttctggggctgcttccacccagtcgctcttcacagcctgctatacctactagggtccaatgcccgccagcctagctccagtgcttctagtaggagggctgaaagggagcaacttttcctccaatcctggaaattcgacacaattagatttgaactgctggaaatacaacacatgttaaatcttaagtacaagggggaaaaaataaatcagttattgaaacataaaaatgaataccaaggacctgatcaaatttcacacagcagtttccttgcaacactttcagctccccatgctccagaatacccacccaagaaaataataggctttaaaacaatatcggctcctcatccaaagaacaactgctgattgaaacacctcattagctgagtgtagagaagtgcatcttatgaaacagtcttagcagtggtaggttgggaaggagatagctgcaaccaaaaaagaaataaatattctataaaccttcagctgctatcgggtttcacttttctgctcttgctgtccaaagactcagtgtatttcattacttttgactctactagacatgactgggtttcaacagtaaaggtcttcaactcttgctagtcattggaatcaagccgcaaaattttaaaaactgagatgctcaggccacaccccagctcaattaaatcagaaaccctagacttgggatcctctaactattagatttcttaaagctccctcagtaattccaatgtacagtcaagtttgagaactaccaatctaaatttcaagtttgagggtatttgaaaattaaagccattcacaatacgaagccagctaaaaatgtagaatgattttgagcaacttgtggagtataataagagaattaatgtgacttcaatgcttggagcattcttgttcaagtggcccaggtttggtgaaacaggactaccttgtcatctgcacgtccaggcatatttcgtagttttgcagtaaataatattcacataatgatactgtattgactttcaattttcagaattaacctatagttacagcacttaagacaaccagagttataaaagagaatttaaatattataactttggacaatataaaagtgatgatttaactgacagaagctaggaaatataagggggaggagaagtggaagaaagcaaagagagtcaggaatactacttaaaactgatgggttaagaaatagtgctttaattctatttaagtaataaaagaaatggatgtaaatcataaaaatatatatctaaaattaaaatattgat

SEQ ID NO: 86 - DNA, 1612 bp, Homo sapiens
  source 1..1612: mol_type = genomic DNA
gcacaggacaattgtgcttgctcttggaaggtcacatggatttgactgtggctctgctcactgatgcgcagcaagtgttggctcccaccgcctccagaatccaactcactggacaccgctgcctcttcggccaccagacctgtcaccatggcccaccgatttccagccctcacccaggagcagaagaaggagctctcagaaattgcccagagcattgttgccaatggaaaggggatcctggctgcagatgaatctgtaggtaccatggggaaccgcctgcagaggatcaaggtggaaaacactgaagagaaccgccggcagttccgagaaatcctcttctctgtggacagttccatcaaccagagcatcgggggtgtgatccttttccacgagaccctctaccagaaggacagccagggaaagctgttcagaaacatcctcaaggaaaaggggatcgtggtgggaatcaagttagaccaaggaggtgctcctcttgcaggaacaaacaaagaaaccaccattcaagggcttgatggcctctcagagcgctgtgctcagtacaagaaagatggtgttgactttgggaagtggcgtgctgtgctgaggattgccgaccagtgtccatccagcctcgctatccaggaaaacgccaacgccctggctcgctacgccagcatctgtcagcagaatggactggtacctattgttgaaccagaggtaattcctgatggagaccatgacctggaacactgccagtatgttactgagaaggtcctggctgctgtctacaaggccctgaatgaccatcatgtttacctggagggcaccctgctaaagcccaacatggtgactgctggacatgcctgcaccaagaagtatactccagaacaagtagctatggccaccgtaacagctctccaccgtactgttcctgcagctgttcctggcatctgctttttgtctggtggcatgagtgaagaggatgccactctcaacctcaatgctatcaacctttgccctctaccaaagccctggaaactaagtttctcttatggacgggccctgcaggccagtgcactggctgcctggggtggcaaggctgcaaacaaggaggcaacccaggaggcttttatgaagcgggccatggctaactgccaggcggccaaaggacagtatgttcacacgggttcttctggggctgcttccacccagtcgctcttcacagcctgctatacctactagggtccaatgcccgccagcctagctccagtgcttctagtaggagggctgaaagggagcaacttttcctccaatcctggaaattcgacacaattagatttgaactgctggaaatacaacacatgttaaatcttaagtacaagggggaaaaaataaatcagttattgaaacataaaaatgaataccaaggacctgatcaaatttcacacagcagtttccttgcaacactttcagctccccatgctccagaatacccacccaagaaaataataggctttaaaacaatatcggctcctcatccaaagaacaactgctgattgaaacacctcattagctgagtgtagagaagtgcatcttatgaaacagtcttagc

SEQ ID NO: 87 - DNA, 2420 bp, Homo sapiens
  source 1..2420: mol_type = genomic DNA
cttatttggcagctgctgcctcacccacagcttttgatatctaggaggactcttctctcccaaactacctgtcaccatggcccaccgatttccagccctcacccaggagcagaagaaggagctctcagaaattgcccagagcattgttgccaatggaaaggggatcctggctgcagatgaatctgtaggtaccatggggaaccgcctgcagaggatcaaggtggaaaacactgaagagaaccgccggcagttccgagaaatcctcttctctgtggacagttccatcaaccagagcatcgggggtgtgatccttttccacgagaccctctaccagaaggacagccagggaaagctgttcagaaacatcctcaaggaaaaggggatcgtggtgggaatcaagttagaccaaggaggtgctcctcttgcaggaacaaacaaagaaaccaccattcaagggcttgatggcctctcagagcgctgtgctcagtacaagaaagatggtgttgactttgggaagtggcgtgctgtgctgaggattgccgaccagtgtccatccagcctcgctatccaggaaaacgccaacgccctggctcgctacgccagcatctgtcagcagaatggactggtacctattgttgaaccagaggtaattcctgatggagaccatgacctggaacactgccagtatgttactgagaaggtcctggctgctgtctacaaggccctgaatgaccatcatgtttacctggagggcaccctgctaaagcccaacatggtgactgctggacatgcctgcaccaagaagtatactccagaacaagtagctatggccaccgtaacagctctccaccgtactgttcctgcagctgttcctggcatctgctttttgtctggtggcatgagtgaagaggatgccactctcaacctcaatgctatcaacctttgccctctaccaaagccctggaaactaagtttctcttatggacgggccctgcaggccagtgcactggctgcctggggtggcaaggctgcaaacaaggaggcaacccaggaggcttttatgaagcgggccatggctaactgccaggcggccaaaggacagtatgttcacacgggttcttctggggctgcttccacccagtcgctcttcacagcctgctatacctactagggtccaatgcccgccagcctagctccagtgcttctagtaggagggctgaaagggagcaacttttcctccaatcctggaaattcgacacaattagatttgaactgctggaaatacaacacatgttaaatcttaagtacaagggggaaaaaataaatcagttattgaaacataaaaatgaataccaaggacctgatcaaatttcacacagcagtttccttgcaacactttcagctccccatgctccagaatacccacccaagaaaataataggctttaaaacaatatcggctcctcatccaaagaacaactgctgattgaaacacctcattagctgagtgtagagaagtgcatcttatgaaacagtcttagcagtggtaggttgggaaggagatagctgcaaccaaaaaagaaataaatattctataaaccttcagctgctatcgggtttcacttttctgctcttgctgtccaaagactcagtgtatttcattacttttgactctactagacatgactgggtttcaacagtaaaggtcttcaactcttgctagtcattggaatcaagccgcaaaattttaaaaactgagatgctcaggccacaccccagctcaattaaatcagaaaccctagacttgggatcctctaactattagatttcttaaagctccctcagtaattccaatgtacagtcaagtttgagaactaccaatctaaatttcaagtttgagggtatttgaaaattaaagccattcacaatacgaagccagctaaaaatgtagaatgattttgagcaacttgtggagtataataagagaattaatgtgacttcaatgcttggagcattcttgttcaagtggcccaggtttggtgaaacaggactaccttgtcatctgcacgtccaggcatatttcgtagttttgcagtaaataatattcacataatgatactgtattgactttcaattttcagaattaacctatagttacagcacttaagacaaccagagttataaaagagaatttaaatattataactttggacaatataaaagtgatgatttaactgacagaagctaggaaatataagggggaggagaagtggaagaaagcaaagagagtcaggaatactacttaaaactgatgggttaagaaatagtgctttaattctatttaagtaataaaagaaatggatgtaaatcataaaaatatatatctaaaattaaaatattgatggtagtatgctaaatttc

SEQ ID NO: 88 - DNA, 1391 bp, Homo sapiens
  source 1..1391: mol_type = genomic DNA
cttatttggcagctgctgcctcacccacagcttttgatatctaggaggactcttctctcccaaactacctgtcaccatggcccaccgatttccagccctcacccaggagcagaagaaggagctctcagaaattgcccagagcattgttgccaatggaaaggggatcctggctgcagatgaatctgtaggtaccatggggaaccgcctgcagaggatcaaggtggaaaacactgaagagaaccgccggcagttccgagaaatcctcttctctgtggacagttccatcaaccagagcatcgggggtgtgatccttttccacgagaccctctaccagaaggacagccagggaaagctgttcagaaacatcctcaaggaaaaggggatcgtggtgggaatcaagttagaccaaggaggtgctcctcttgcaggaacaaacaaagaaaccaccattcaagggcttgatggcctctcagagcgctgtgctcagtacaagaaagatggtgttgactttgggaagtggcgtgctgtgctgaggattgccgaccagtgtccatccagcctcgctatccaggaaaacgccaacgccctggctcgctacgccagcatctgtcagcagaatggactggtacctattgttgaaccagaggtaattcctgatggagaccatgacctggaacactgccagtatgttactgagaaggtcctggctgctgtctacaaggccctgaatgaccatcatgtttacctggagggcaccctgctaaagcccaacatggtgactgctggacatgcctgcaccaagaagtatactccagaacaagtagctatggccaccgtaacagctctccaccgtactgttcctgcagctgttcctggcatctgctttttgtctggtggcatgagtgaagaggatgccactctcaacctcaatgctatcaacctttgccctctaccaaagccctggaaactaagtttctcttgggtggcaaggctgcaaacaaggaggcaacccaggaggcttttatgaagcgggccatggctaactgccaggcggccaaaggacagtatgttcacacgggttcttctggggctgcttccacccagtcgctcttcacagcctgctatacctactagggtccaatgcccgccagcctagctccagtgcttctagtaggagggctgaaagggagcaacttttcctccaatcctggaaattcgacacaattagatttgaactgctggaaatacaacacatgttaaatcttaagtacaagggggaaaaaataaatcagttattgaaacataaaaatgaataccaaggacctgatcaaatttcacacagcagtttccttgcaacactttcagctccccatgctccagaatacccaccc

SEQ ID NO: 89 - DNA, 1444 bp, Homo sapiens
  source 1..1444: mol_type = genomic DNA
aggcttccaggaaagtgtagttctggatttggtcaggctggcattcttcattcctaaagggtgctgaagtgagatgcaggaaatccaaatagctggaggaaaagaggcaggatattagaactacctgtttcttccatacataccagcattctgaagatttctagacctgtcaccatggcccaccgatttccagccctcacccaggagcagaagaaggagctctcagaaattgcccagagcattgttgccaatggaaaggggatcctggctgcagatgaatctgtaggtaccatggggaaccgcctgcagaggatcaaggtggaaaacactgaagagaaccgccggcagttccgagaaatcctcttctctgtggacagttccatcaaccagagcatcgggggtgtgatccttttccacgagaccctctaccagaaggacagccagggaaagctgttcagaaacatcctcaaggaaaaggggatcgtggtgggaatcaagttagaccaaggaggtgctcctcttgcaggaacaaacaaagaaaccaccattcaagggcttgatggcctctcagagcgctgtgctcagtacaagaaagatggtgttgactttgggaagtggcgtgctgtgctgaggattgccgaccagtgtccatccagcctcgctatccaggaaaacgccaacgccctggctcgctacgccagcatctgtcagcagaatggactggtacctattgttgaaccagaggtaattcctgatggagaccatgacctggaacactgccagtatgttactgagaaggtcctggctgctgtctacaaggccctgaatgaccatcatgtttacctggagggcaccctgctaaagcccaacatggtgactgctggacatgcctgcaccaagaagtatactccagaacaagtagctatggccaccgtaacagctctccaccgtactgttcctgcagctgttcctggcatctgctttttgtctggtggcatgagtgaagaggatgccactctcaacctcaatgctatcaacctttgccctctaccaaagccctggaaactaagtttctcttatggacgggccctgcaggccagtgcactggctgcctggggtggcaaggctgcaaacaaggaggcaacccaggaggcttttatgaagcgggccatggctaactgccaggcggccaaaggacagtatgttcacacgggttcttctggggctgcttccacccagtcgctcttcacagcctgctatacctactagggtccaatgcccgccagcctagctccagtgcttctagtaggagggctgaaagggagcaacttttcctccaatcctggaaattcgacacaattagatttgaactgctggaaatacaacacatgttaaatcttaagtacaagggggaaaaaataaatcagttattgaaacataaaaa

SEQ ID NO: 90 - DNA, 1408 bp, Homo sapiens
  source 1..1408: mol_type = genomic DNA
tcttttccagacctgtcaccatggcccaccgatttccagccctcacccaggagcagaagaaggagctctcagaaattgcccagagcattgttgccaatggaaaggggatcctggctgcagatgaatctgtaggtaccatggggaaccgcctgcagaggatcaaggtggaaaacactgaagagaaccgccggcagttccgagaaatcctcttctctgtggacagttccatcaaccagagcatcgggggtgtgatccttttccacgagaccctctaccagaaggacagccagggaaagctgttcagaaacatcctcaaggaaaaggggatcgtggtgggaatcaagttagaccaaggaggtgctcctcttgcaggaacaaacaaagaaaccaccattcaagggcttgatggcctctcagagcgctgtgctcagtacaagaaagatggtgttgactttgggaagtggcgtgctgtgctgaggattgccgaccagtgtccatccagcctcgctatccaggaaaacgccaacgccctggctcgctacgccagcatctgtcagcagaatggactggtacctattgttgaaccagaggtaattcctgatggagaccatgacctggaacactgccagtatgttactgagaaggtcctggctgctgtctacaaggccctgaatgaccatcatgtttacctggagggcaccctgctaaagcccaacatggtgactgctggacatgcctgcaccaagaagtatactccagaacaagtagctatggccaccgtaacagctctccaccgtactgttcctgcagctgttcctggcatctgctttttgtctggtggcatgagtgaagaggatgccactctcaacctcaatgctatcaacctttgccctctaccaaagccctggaaactaagtttctcttatggacgggccctgcaggccagtgcactggctgcctggggtggcaaggctgcaaacaaggaggcaacccaggaggcttttatgaagcgggccatggtaagatgctgccacctcttatctacttgatgatgttcacatttggggcttgactttccaacacggagaagcattgttttctttgggccaagaaggtatctaccgatagtgtctattaggcatttgaaaatgtggcagtagaggtcagtatgaggattgaggctagagagaattttgaattatccacactagagtatagttgatgacaggagactgaaggacaatttcaacagaaacacttcagagggaaggagataagaggaccaagaactgaacctaggatactttttattttgggaagatgaagaagagaagcaaccaagaaaagcagcgattatattgtagggtgaaccaagcattctgggaataaagacagaagaatttctttc

SEQ ID NO: 91 - DNA, 1611 bp, Homo sapiens
  source 1..1611: mol_type = genomic DNA
agctgctgcctcacccacagcttttgcatatctaggaggactcttctctcccaaactacctgtcacatggcccaccgatttccagccctcacccaggagcagaagaaggagctctcagaaattgcccagagcattgttgccaatggaaaggggatcctggctgcagatgaatctgtaggtaccatggggaaccgcctgcagaggatcaaggtggaaaacactgaagagaaccgccggcagttccgagaaatcctcttctctgtggacagttccatcaaccagagcatcgggggtgtgatccttttccacgagaccctctaccagaaggacagccagggaaagctgttcagaaacatcctcaaggaaaaggggatcgtggtgggaatcaagttagaccaaggaggtgctcctcttgcaggaacaaacaaagaaaccaccattcaagggcttgatggcctctcagagcgctgtgctcagtacaagaaagatggtgttgactttgggaagtggcgtgctgtgctgaggattgccgaccagtgtccatccagcctcgctatccaggaaaacgccaacgccctggctcgttacgccagcatctgtcagcagaatggactggtacctattgttgaaccagaggtaattcctgatggagaccatgacctggaacactgccagtatgttactgagaaggtcctggctgctgtctacaaggccctaaatgaccatcatgtttacctggagggcaccctgctaaagcccaacatggtgactgctggacatgcctgcaccaagaagtatactccagaacaagtagctatggccaccgtaacagctctccaccgtactgttcctgcagctgttcctggcatctgctttttgtctggtggcatgagtgaagaggatgccactctcaacctcaatgctatcaacctttgccctctaccaaagccctggaaactaagtttctcttatggacgggccctgcaggccagtgcactggctgcctggggtggcaaggctgcaaacaaggaggcaacccaggaggcttttatgaagcgggccatggctaactgccaggcggccaaaggacagtatgttcacacgggttcttctggggctgcttccacccagtcgctcttcacagcctgctatacctactagggtccaatgcccgccagcctagctccagtgcttctagtaggagggctgaaagggagcaacttttcctccaatcctggaaattcgacacaattagatttgaactgctggaaatacaacacatgttaaatcttaagtacaagggggaaaaaataaatcagttattgaaacataaaaatgaataccaaggacctgatcaaatttcacacagcgagtttccttgcaacactttcagctccccatgctccagaatacccacccaagaaaataaccgggatctaaaacaataatcggctcctcatccaaagaacaactgctgattgaaacacctcattagctgatgtagagaagtgcatcttatgaaacagtcttagcagtggtaggttgggaaggagatagctgcaaccaaaaaagaaataaatattctataaaccttcaaaaaaaaaaaaaaaa

SEQ ID NO: 92 - DNA, 1652 bp, Homo sapiens
  source 1..1652: mol_type = genomic DNA
aaaaacatgatgagaagtctataaaaattgtgtgctaccaaagatctgtcttatttggcagctgctgcctcacccacagcttttgatatctaggaggactcttctctcccaaactacctgtcaccatggcccaccgatttccagccctcacccaggagcagaagaaggagctctcagaaattgcccagagcattgttgccaatggaaaggggatcctggctgcagatgaatctgtaggtaccatggggaaccgcctgcagaggatcaaggtggaaaacactgaagagaaccgccggcagttccgagaaatcctcttctctgtggacagttccatcaaccagagcatcgggggtgtgatccttttccacgagaccctctaccagaaggacagccagggaaagctgttcagaaacatcctcaaggaaaaggggatcgtggtgggaatcaagttagaccaaggaggtgctcctcttgcaggaacaaacaaagaaaccaccattcaagggcttgatggcctctcagagcgctgtgctcagtacaagaaagatggtgttgactttgggaagtggcgtgctgtgctgaggattgccgaccagtgtccatccagcctcgctatccaggaaaacgccaacgccctggctcgctacgccagcatctgtcagcagaatggactggtacctattgttgaaccagaggtaattcctgatggagaccatgacctggaacactgccagtatgttactgagaaggtcctggctgctgtctacaaggccctgaatgaccatcatgtttacctggagggcaccctgctaaagcccaacatggtgactgctggacatgcctgcaccaagaagtatactccagaacaagtagctatggccaccgtaacagctctccaccgtactgttcctgcagctgttcctggcatctgctttttgtctggtggcatgagtgaagaggatgccactctcaacctcaatgctatcaacctttgccctctaccaaagccctggaaactaagtttctcttatggacgggccctgcaggccagtgcactggctgcctggggtggcaaggctgcaaacaaggaggcaacccaggaggcttttatgaagcgggccatggctaactgccaggcggccaaaggacagtatgttcacacgggttcttctggggctgcttccacccagtcgctcttcacagcctgctatacctactagggtccaatgcccgccagcctagctccagtgcttctagtaggagggctgaaagggagcaacttttcctctaatcctggaaattcgacacaattagatttgaactgctggaaatacaacacatgttaaatcttaagtacaagggggaaaaaataaatcagttattgaaacataaaaatgaataccaaggacctgatcaaatttcacacagcagtttccttgcaacactttcagctccccatgctccagaatacccacccaagaaaataataggctttaaaacaatatcggctcctcatccaaagaacaactgctgattgaaacacctcattagctgagtgtagagaagtgcatcttatgaaacagtcttagcagtggtaggttgggaaggagatagctgcaaccaaaaaagaaataaatattctataaaccttc

SEQ ID NO: 93 - DNA, 1569 bp, Homo sapiens
  source 1..1569: mol_type = genomic DNA
cttatttggcagctgctgcctcacccacagcttttgatatctaggaggactcttctctcccaaactacctgtcaccatggcccaccgatttccagccctcacccaggagcagaagaaggagctctcagaaattgcccagagcattgttgccaatggaaaggggatcctggctgcagatgaatctgtaggtaccatggggaaccgcctgcagaggatcaaggtggaaaacactgaagagaaccgccggcagttccgagaaatcctcttctctgtggacagttccatcaaccagagcatcgggggtgtgatccttttccacgagaccctctaccagaaggacagccagggaaagctgttcagaaacatcctcaaggaaaaggggatcgtggtgggaatcaagttagaccaaggaggtgctcctcttgcaggaacaaacaaagaaaccaccattcaagggcttgatggcctctcagagcgctgtgctcagtacaagaaagatggtgttgactttgggaagtggcgtgctgtgctgaggattgccgaccagtgtccatccagcctcgctatccaggaaaacgccaacgccctggctcgctacgccagcatctgtcagcagaatggactggtacctattgttgaaccagaggtaattcctgatggagaccatgacctggaacactgccagtatgttactgagaaggtcctggctgctgtctacaaggccctgaatgaccatcatgtttacctggagggcaccctgctaaagcccaacatggtgactgctggacatgcctgcaccaagaagtatactccagaacaagtagctatggccaccgtaacagctctccaccgtactgttcctgcagctgttcctggcatctgctttttgtctggtggcatgagtgaagaggatgccactctcaacctcaatgctatcaacctttgccctctaccaaagccctggaaactaagtttctcttatggacgggccctgcaggccagtgcactggctgcctggggtggcaaggctgcaaacaagaaggcaacccaggaggcttttatgaagcgggccatggctaactgccaggcggccaaaggacagtatgttcacacgggttcttctggggctgcttccacccagtcgctcttcacagcctgctatacctactagggtccaatgcccgccagcctagctccagtgcttctagtaggagggctgaaagggagcaacttttcctctaatcctggaaattcgacacaattagatttgaactgctggaaatacaacacatgttaaatcttaagtacaagggggaaaaaataaatcagttattgaaacataaaaatgaataccaaggacctgatcaaatttcacacagcagtttccttgcaacactttcagctccccatgctccagaatacccacccaagaaaataataggctttaaaacaatatcggctcctcatccaaagaacaactgctgattgaaacacctcattagctgagtgtagagaagtgcatcttatgaaacagtcttagcagtggtaggttgggaaggagatagctgc

SEQ ID NO: 94 - DNA, 1422 bp, Homo sapiens
  source 1..1422: mol_type = genomic DNA
cttatttggcagctgctgcctcacccacagcttttgatatctaggaggactcttctctcccaaactacctgtcaccatggcccaccgatttccagccctcacccaggagcagaagaaggagctctcagaaattgcccagagcattgttgccaatggaaaggggatcctggctgcagatgaatctgtaggtaccatggggaaccgcctgcagaggatcaaggtggaaaacactgaagagaaccgccggcagttccgagaaatcctcttctctgtggacagttccatcaaccagagcatcgggggtgtgatccttttccacgagaccctctaccagaaggacagccagggaaagctgttcagaaacatcctcaaggaaaaggggatcgtggtgggaatcaagttagaccaaggaggtgctcctcttgcaggaacaaacaaagaaaccaccattcaagggcttgatggcctctcagagcgctgtgctcagtacaagaaagatggtgttgactttgggaagtggcgtgctgtgctgaggattgccgaccagtgtccatccagcctccctatccaggaaaacgccaacgccctggctcgctacgccagcatctgtcagcagaatggactggtacctattgttgaaccagaggtaattcctgatggagaccatgacctggaacactgccagtatgttactgagaaggtcctggctgctgtctacaaggccctgaatgaccatcatgtttacctggagggcaccctgctaaagcccaacatggtgactgctggacatgcctgcaccaagaagtatactccagaacaagtagctatggccaccgtaacagctctccaccgtactgttcctgcagctgttcctggcatctgctttttgtctggtggcatgagtgaagaggatgccaccctcaacctcaatgctatcaacctttgccctctaccaaagccctggaaactaagtttctctggggtggcaaggctgcaaacaaggaggcaacccaggaggcttttatgaagcgggccatggctaactgccaggcggccaaaggacagtatgttcacacgggttcttctggggctgcttccacccagtcgctcttcacagcctgctatacctactagggtccaatgcccgccagcctagctccagtgcttctagtaggagggctgaaagggagcaacttttcctccaatcctggaaattcgacacaattagatttgaactgctggaaatacaacacatgttaaatcttaagtacaagggggaaaaaataaatcagttgttgaaacataaaaatgaataccaaggacctgatcaaatttcacacagcagtttccttgcaacactttcagctccccatgctccagaatacccacccaaaaaaaaaaaaaaaaaaaaaaaaaaaaaaa

SEQ ID NO: 95 - DNA, 571 bp, Homo sapiens
  source 1..571: mol_type = genomic DNA
catgcctgcaccaagaagtatactccagaacaagtagatatggccaccgtaacagctctccaccgtactgttcctgcagctgttcctggcatctgctttttgtctggtggcatgagtgaagaggatgccactctcaacctcaatgctatcaacctttgccctctaccaaagccctggaaactaagtttctcttatggacgggccctgcaggccagtgcactggctgcctggggtggcaaggctgcaaacaaggaggcaacccaggaggcttttatgaagcgggccatggctaactgccaggcggccaaaggacagtatgttcacacgggttcttctggggctgcttccacccagtcgctcttcacagcctgctatacctactagggtccaatgcccgccagcctagctccagtgcttctagtaggagggctgaaagggagcaacttttcctccaatcctggaaattcgacacaattagatttgaactgctggaaatacaacacatgttaaatcttaagtacaagggggaaaaaataaatcagttattgaaacataaaaatgaataccaagg

SEQ ID NO: 96 - DNA, 1612 bp, Homo sapiens; identical to SEQ ID NO: 86
  source 1..1612: mol_type = genomic DNA

SEQ ID NO: 97 - DNA, 2451 bp, Homo sapiens
  source 1..2451: mol_type = genomic DNA
aaaaacatgatgagaagtctataaaaattgtgtgctaccaaagatctgtcttatttggcagctgctgcctcacccacagcttttgatatctaggaggactcttctctcccaaactacctgtcaccatggcccaccgatttccagccctcacccaggagcagaagaaggagctctcagaaattgcccagagcattgttgccaatggaaaggggatcctggctgcagatgaatctgtaggtaccatggggaaccgcctgcagaggatcaaggtggaaaacactgaagagaaccgccggcagttccgagaaatcctcttctctgtggacagttccatcaaccagagcatcgggggtgtgatccttttccacgagaccctctaccagaaggacagccagggaaagctgttcagaaacatcctcaaggaaaaggggatcgtggtgggaatcaagttagaccaaggaggtgctcctcttgcaggaacaaacaaagaaaccaccattcaagggcttgatggcctctcagagcgctgtgctcagtacaagaaagatggtgttgactttgggaagtggcgtgctgtgctgaggattgccgaccagtgtccatccagcctcgctatccaggaaaacgccaacgccctggctcgctacgccagcatctgtcagcagaatggactggtacctattgttgaaccagaggtaattcctgatggagaccatgacctggaacactgccagtatgttactgagaaggtcctggctgctgtctacaaggccctgaatgaccatcatgtttacctggagggcaccctgctaaagcccaacatggtgactgctggacatgcctgcaccaagaagtatactccagaacaagtagctatggccaccgtaacagctctccaccgtactgttcctgcagctgttcctggcatctgctttttgtctggtggcatgagtgaagaggatgccactctcaacctcaatgctatcaacctttgccctctaccaaagccctggaaactaagtttctcttatggacgggccctgcaggccagtgcactggctgcctggggtggcaaggctgcaaacaaggaggcaacccaggaggcttttatgaagcgggccatggctaactgccaggcggccaaaggacagtatgttcacacgggttcttctggggctgcttccacccagtcgctcttcacagcctgctatacctactagggtccaatgcccgccagcctagctccagtgcttctagtaggagggctgaaagggagcaacttttcctccaatcctggaaattcgacacaattagatttgaactgctggaaatacaacacatgttaaatcttaagtacaagggggaaaaaataaatcagttattgaaacataaaaatgaataccaaggacctgatcaaatttcacacagcagtttccttgcaacactttcagctccccatgctccagaatacccacccaagaaaataataggctttaaaacaatatcggctcctcatccaaagaacaactgctgattgaaacacctcattagctgagtgtagagaagtgcatcttatgaaacagtcttagcagtggtaggttgggaaggagatagctgcaaccaaaaaagaaataaatattctataaaccttcagctgctatcgggtttcacttttctgctcttgctgtccaaagactcagtgtatttcattacttttgactctactagacatgactgggtttcaacagtaaaggtcttcaactcttgctagtcattggaatcaagccgcaaaattttaaaaactgagatgctcaggccacaccccagctcaattaaatcagaaaccctagacttgggatcctctaactattagatttcttaaagctccctcagtaattccaatgtacagtcaagtttgagaactaccaatctaaatttcaagtttgagggtatttgaaaattaaagccattcacaatacgaagccagctaaaaatgtagaatgattttgagcaacttgtggagtataataagagaattaatgtgacttcaatgcttggagcattcttgttcaagtggcccaggtttggtgaaacaggactaccttgtcatctgcacgtccaggcatatttcgtagttttgcagtaaataatattcacataatgatactgtattgactttcaattttcagaattaacctatagttacagcacttaagacaaccagagttataaaagagaatttaaatattataactttggacaatataaaagtgatgatttaactgacagaagctaggaaatataagggggaggagaagtggaagaaagcaaagagagtcaggaatactacttaaaactgatgggttaagaaatagtgctttaattctatttaagtaataaaagaaatggatgtaaatcataaaaatatatatctaaaattaaaatattgat

SEQ ID NO: 98 - protein, 364 aa, Homo sapiens
MAHRFPALTQEQKKELSEIAQSIVANGKGILAADESVGTMGNRLQRIKVENTEENRRQFREILFSVDSSINQSIGGVILFHETLYQKDSQGKLFRNILKEKGIVVGIKLDQGGAPLAGTNKETTIQGLDGLSERCAQYKKDGVDFGKWRAVLRIADQCPSSLAIQENANALARYASICQQNGLVPIVEPEVIPDGDHDLEHCQYVTEKVLAAVYKALNDHHVYLEGTLLKPNMVTAGHACTKKYTPEQVAMATVTALHRTVPAAVPGICFLSGGMSEEDATLNLNAINLCPLPKPWKLSFSYGRALQASALAAWGGKAANKEATQEAFMKRAMANCQAAKGQYVHTGSSGAASTQSLFTACYTY

SEQ ID NO: 99 - protein, 316 aa, Homo sapiens [sequence omitted]

SEQ ID NO: 100 - protein, 342 aa, Homo sapiens
MAHRFPALTQEQKKELSEIAQSIVANGKGILAADESVGTMGNRLQRIKVENTEENRRQFREILFSVDSSINQSIGGVILFHETLYQKDSQGKLFRNILKEKGIVVGIKLDQGGAPLAGTNKETTIQGLDGLSERCAQYKKDGVDFGKWRAVLRIADQCPSSLAIQENANALARYASICQQNGLVPIVEPEVIPDGDHDLEHCQYVTEKVLAAVYKALNDHHVYLEGTLLKPNMVTAGHACTKKYTPEQVAMATVTALHRTVPAAVPGICFLSGGMSEEDATLNLNAINLCPLPKPWKLSFSYGRALQASALAAWGGKAANKEATQEAFMKRAMVRCCHLLST

SEQ ID NO: 101 - protein, 127 aa, Homo sapiens
HACTKKYTPEQVDMATVTALHRTVPAAVPGICFLSGGMSEEDATLNLNAINLCPLPKPWKLSFSYGRALQASALAAWGGKAANKEATQEAFMKRAMANCQAAKGQYVHTGSSGAASTQSLFTACYTY

SEQ ID NO: 102 - DNA, 13640 bp, Homo sapiens
  source 1..13640: mol_type = genomic DNA
agcagagcaatcaccaccaagcctggaataactgcaagggctctgctgacatcttcctgaggtgccaaggaaatgaggatggaggaaggaatgaatgttctccatgactttgggatccagtcaacacattacctccaggtgaattaccaagactcccaggactggttcatcttggtgtccgtgatcgcagacctcaggaatgccttctacgtcctcttccccatctggttccatcttcaggaagctgtgggcattaaactcctttgggtagctgtgattggagactggctcaacctcgtctttaagtggtaagaaccatatagagaggagatcagcaagaaaagaggctggcattcgctctcgcaatgtctgtccatcagaagttgctttccccaggctattcaggaagccacgggctactcatgcttccaacccctctctctgactttggatcatctacataaagggggaagacagaaaaaatcctaccagtgagttgaaaatacaggaaagcctatttcatatgggttaaagggtaggacagttgaatttcgtgaaaagtctgagttatataggctttgagcaaagagttttattagtatgaagcagaagaggtaacataaagaaagatgtatggggccaggcatggtggctcacacctgtaatcccagcactttgggaggccgaggtgggcgaatcactcctgggtgaactcaggagttcaagaccagcctgggcaacatggcgaaactccatctctacaaaaacattacgaaaattagctgggcgtgttggtgctgtagtcccagctactcaggaggctgaggtgagaggcggaggaggttgcagtgagtcaagatcatgccactgcactccagcctgggcaacagagtaagaccctgtctcaaaaaaaaaaaaaagatagatgatgtatgctgtatgaaaaaaggaaacacacagatgattcaacagcctgttttgtggggtaatgaaaagtcaccctgggaactgggctccagccctcgttctgccacccaccaactacatgtccttggcaagtcatatcaattatctgagtttctgttttataatctacaaataggttatctctggcagcttaataataatcagggttaacatttattaaacagtgtgtgccagtccatgtgctatgtgcttttctgtgaggtagttactgctatttacagaaacagtagatgcagagaccaaggtgctgagttaaatgattaggccaacaaggttagtacatgccgagccaggatggaagcccaggtaggcaggctggcttccgcggcaatgctcttatgaactatgttacgtccagtgctgataaactgactctctggggagcaggggaaagccctgagtttagcatttgccaatttctatcacgtaaacattcccattctggccactttctttctttctttcttttgtttgtttgtttgagatggagtctcgcactgttgcctggctggagtgcaatggtgcaatctcagctcactgcaacctctgcctctccggttcaagtgattctcctgcctcagcctcccaagtagctgggattacaggtgcccgccaccatgcccagctaattttttttgtatttttagtagagacatggtttcactatgttgactaggctggtctcgaactcctgacctcatgatctgcctgccttggcctccctaagtgctaggattacaggcgtgagccactacacccagccgcatgattctaaaaaataaaaagatgaagtgttattccaaacatctgatctccattgaagaaccatgcaatctctctgggttgatagaggccagagttagtggctctccctgatttcggtgagaaatcactattccaccatcacgggataaaaggcatcctgactggcggttgacacctatttccacagtgaaagatatatctagtacttttaaaggggaagtggtttgtctgagatactctgtttcaaagtagagaggatacagaacaagcatctgaagctatatacatccttacagagagcaattctgatggaaatgcaggccatgtttccctggggggggctcgtcctaggggctggagtgcattctctgatgtcagaggaaatgcaagattccctgaggcctgagggaacccatggtatatgcaagtccaagtttcaaactgtagttccatatgcattcttccaggacaaatacttcttgaggttaaaaaaaaaaagtcacatagctgccattttatggatttcaggatttttttttttttttttttgagatggagtcttgctctgtcacccagcctgtagtgcagtggcataatctcggctcacggcaacctccgcctcccaggttcaagcgattctcttgccttagcctcccgagtagctgggattacagtcacgcaccaccacatctggctaattctttatattttttggtagaaacggtgtttcaccatgttggccaggctggtctcaaactcctgacctcatgtgatctgcctgccttggcctcccaaagtgctgagattacaggtgtgagccaccgcgcctgcctggagttcagaatcttgggcttcattatttgtgtttaaatagatcatacagtcaggcacggtggctcatgcctgtaatcccagcactttgggaggctgaggtgggaggattgcctgagttcaggagatggagaccagcctgggcaacatggtgaaaccccgtctctactaaaaatacaaaaactagctggatgtggtggcacacacctgtagtcccagctattcaggaggctgaggtgggaggatcccaggaggtagaggtcacaatgagccgagattgcgccactgcactccaggctgggttactgagccagatcctgtctcaaaaaaaaaaaagataatacattcaaacagttcaaaatgcaaaagttacatacataaggaagtgtcatgaaatatctccctctcacacttctccccagccacccagttctcccttctagaggcaacatgtgaaatccttctcaggctacactcttcttgaaggtgtaggctttgggcaaaagcattcattcagtaaccccagaaacttgttctgtttttccataggattctctttggacagcgtccatactggtgggttttggatactgactactacagcaacacttccgtgcccctgataaagcagttccctgtaacctgtgagactggaccaggtaagcgtcccagcccctgcagacagaagctgagtggacctcgtttacctgttatggatgaaactgaccttgaggggacatgaggagagccattcctttgtacttttgtcatgctcttcaattggcacaaattaattcacttctgcaatactttcctgaatagcacagtagtattggaaatctgcctattacagaacctggatggagtccagagaggcacgggcatccatgggcaaagggctcgtgagagtcaccgccctgcagcgctgtgtcctgagaaaggagggggcagaagcctgagcttctgggggtccttcccaatggcctggcccactggatgtgccctcctgagctgaccgtccaatcccttgccctctctgtgcctacgttttattagttacagccagatggttactgtcaaatcaaatgatagatttcattttcagtatgtaataggaagcccctccctcaccctaaagtctcagctgccctctaagactagtactctctaaggtactagtatcccttcctcagagaccctttccctgaccccaaaactagggaaggtcccttagttatttgctctcacagaccacgcatttacctcagagcatattcactcattcagctgttacttaccaagcacctactgggagctatacactgttctatgtgctagggatacctctgtcagtgaacaacacagacacaaagatccctgcccttgtggagctgaaatctgaatagaggaggtgaaatatacaaaaattataataaataagtaaactaggccagttgtggttgctcatgcctgtaatcccagcactttgggaagccaaggtaggtagatcacctgaggtcaggagttcaaaaccagcctggccaacattgcaaaatcctgtctttactaaaaatggaaaaattggtcaggcgtgatggcacacgcctgtagtctcagctacctgggaggctgaggcaggagaatcgcttgaacctgggaggcagaggttgcagtgaaccgagatcggaccactgcactccagcctgaatgacagaacgagactctgtctcaaaaaaaaagtaaactattaatatgtaggataggccaggcacggtggctcaccctgtaatcccagcactttgggaggctgaggcgggtggatcacctgaggtgaggagttcaagaccagcctggccaacatggcaaaaccctgtctctactaaaaatacaaaaattagctgggtgtcctggtgcatgcctgtaatctgagctactcaggaggctaaggcaggagaatcgcttgaacctgggaggtggtgagccaagattgcgccattgcactccagcctgggcgacaaaatgagacaccatctgaaaaaaaaaaaaaaatatatatatatatacacacacacacacacacacacacacacacacatataatactagaaaatgattgtttataggcaaaaaaaaaaaaaaagaagaagaagaagaaaaggaaaggagaaggaaagaaggaccaaacatcttttgtagaaatatgtttgctttcatcataacagcttgttatcaaggatgaatttctccctgaaattaatggaggcacagactggaaagtttaaagtggctttaagaggttattttatttagtcctctgtcttaatagaagcaaattattatctctgctccttaggtagagtagctaaggctcagaaagtaggccgggcgcggtggctcacgcctgtaatcctagcactttgggaggccaacgcaggtggatcacctgaggtcaggagtttgagaccagcctggccaacatggtgaaacctcgtcactaataaaaaaatacaaaaacttagccaggcatggtggcgggcgcctgtaatcccagctacccaggaggctgcggcaggagaatcacttcaacccgggaggcagaggttgcagtgagctgaaatcacaccactgcactccagccttggtgacagagaaagattctgtcaggaaaaaaaaaaaaaagtttaaatgaattacccaaggtatataattgttagtgttagaaggaagaagaagggagggaggaaggaagggagaaagaaagggaaggaggaagggagggagggaagaaagcctttatttatctatggggttccctggaaagcaggctgaaatggagattcacgtgcaggagtttagatactctggggaactatacttgtagaagggaaggaacaggaacagggcagaaggagaggtccggttgtgattctgcctcatccaaccccacagcgagctctgaagctggggatggctcctcagagttggtccaagttgggacaagggaatcagaccctggggagagcgtaaccttgatcaaggcgactctctttagcccagggcaatgccaggagaaggctgagagcagaaagccatctaccatcacactctcaacagctacgaaataagtcctgcagttcaggagggaggtctgggcggcacatctcaggaccctctatctctcagggtagaggaattaagaatgggatgggaaccagacgggccatggtggctcacacctataatcccaacactttgggaggccaagggtaggaggattgcttgagcccaagagttcaaaaccagcctgggcaaaaacaatcaaacaaacaaacaaaacacatttaaaaaatttgctgtgtgtggtggtgtgcacctgtggtcccagctactcagggggctgaggtgggaggattgcttgagtccaggaggtcgaggctgcagtgagctatgatcatggcactgcattgcagcctaggagacaaagcaagacactgtctctaaaaaaacaaaaaacaaacaaataaaaaaacggaaccggttgcaagcagggttaaatagcgtggtcagagtaggactcactgagaatatgagatctgagtcaagtcttcaaggatgtgaggaagtaagtttctggcagaagagctgtgaagggctgtctggccagagaagattgcaatgcaaaagccctgaggtgggaacgtgtttggtgtgtttaaaggaaagcaatgaggccagtgtagccagaacagagtgtgcaaggagagaaggaacagaagatgtggagggcagatcagtttgtaattgtacgcccagtatgctgattctttgtgtaatctccagactgtattaaactgcaagagcagggcccctctctggctttgctcatcattgtattcccagagccttgcacaatgcttggtgcataggagatggaaatttgttaaataaatgaattatggataacgaatggatggtaagatgggtggatggatggggggtgaacggatggatggggggtgaatggatggatgaatgggtagatgggtggatagggggatggctgggtggctgggtagatgatgcactgtctcccagatgaggaccttttcacctttactccattctctttcctgccctttagggagcccctctggccatgccatgggcacagcaggtgtatactacgtgatggtcacatctactctttccatctttcagggaaagataaagccgacctacagatttcggtaagaactcaccactggggtgtaggtggtggagggcaggaggcagctctctctgtagctgacacaccacgtattcttcctcacatccccctagcccgctcccacacctgggcagccgctgattaagagttgtggcactttggatagggataaacctcagagtcagggaatgtttgggctgaaagggatccagtagtgcaatccgttgttttacagataaggaaacaaagcccaacaccatgaagggacttataaaaataaggtagtgaagtagcagcagggcttaaataaaaacccatgtctgtaccaaccacagagtcacccatccaggttaaaataaccagagaaacagaagatattcctactacagagaattccgggtgtgcagccacagtgcaaatcctttttatttttatttttgagatgcagtctcgctctgtcatccaggctgaagtgcagtggcacgatcatgtctcgctgcaacctctgcctcccaggctcaagcgatcctcccacctcagccatctgagtagctgggaccacaggccacacaccacacccagctaatttctcgtatctttttgtagagacagagttctgctatgttgcccaggctcaggctggtcttgatctcaagcaattggcttgcctcagcctcctaaaatattgggattacaggcatgagccaccgcgccagccatgcaaatccttaattatcaaacagataaaatagggaagttaaaattcatatacacaagggttaaccacttgccacaggcattttttttttttttttgagacggaatctcgctctgttgcccaggctggagtgcagtggcgccatctcgcctcactgcaacctccgcttcctgggttcaagctattcttctgcctcagcctaccgagtagctgggactacaggcacgtgccaccacacctggctaatttttttatttttagtagagatggggtttcaccatattggccaggctggtcttgaactcctgacctagtgatccatccgcctcagcctcccaaagtgctgggattgcaggcatgagccaccgcgcctggccttttttttttttttttgagacggagttttgctcttgttgcccaggctagagtgcagtggcgcagtctcggctcactgtaacctccacctcctgagttcaagcaattctcctgcctcagcctctcaaatagctgggattacaggcgtgagccaccccacctggctaattttgtaattttttttttagtagagatggggtttcacctgttgatcaggctggtctcaaactcctgacctcaagtgatccacccacctcggcctcccaaagtgctgggattacaagcataagccaccgtgcctggtcaattttgatcttttttaaagagacaggggtcttgctatgttgcccagactagtcttgaactcctggcctcaagtgatcctctcacctcggcctcccaaagtattgggattacaggtctgagccgctgcacccagcccccaacaggcatctttggacttttgagtactggctttaatttacaaaaattccactgagagcacctaagtttgccaggctccaacatttctgcaggggctgttttctttgctgaaggatctgcacctgtgttctgttatggttgcctcttctgttgcaggtgcttgaatgtcattttgtggttgggattctgggctgtgcagctgaatgtctgtctgtcacgaatctaccttgctgctcattttcctcatcaagttgttgctggagtcctgtcaggtatgggctgatctgactcccttccttctcccccaaaccccattccgtttctctccctaatcaggacaaaatcccagcattccagccacatcctgtgtgtaatcagtactgttagcatttctgtgggttgaaagtcaagaatgagcaacttgaaatgattaatttctataagagtgcccagatctatagaatgaattgtgtagaagttaccatacatcaaattaacgcaccaaattgaattagcttgaaatctcagagctttttacaatctttatttcttactggtcttcaacaggccctaatttacttttcagggaatctgccaaatttaacaaattaacacgatgtcctaggaaagctgttcatttaaatacattcatttgcaaacctaatagataactgcagttgatctcttttataggttcagagttttgaatatgtttttttttgttttttttttttgagatggagtctcgctctgtgacccaggctagagtgcagtggtgcgatctcggctcactgcaagctccacctcctgggttcacgccattctcctgcctcagcctctccgagtagctgggactacaggcgcccgccaccatgcccggctaattttttgtatttttagcagagacggggtttcaccgtggtcttgatctcctgacctcgtgatccgcccgcctcggcctcccaaagcgctgggattacaagggtgagccaccgcaccctgcctgaatatgtgttttcttagatccaattaacaagggtaagacaagatttaagttaagcataagaaagattttgtgggaggcactggaatataagaccttaacaaaactgtggaatttctcccctggagatttgtaagaacggaacatagcagcattcaaagaagaatgttgagaacaagggagataatggtttcatggtaatcacaaaagtaacacagcatttagtactgggttccatgtttgaggaagaacctggaagccatatcacatgaaaaacctgggaatgtttaggttagagagaataactgtgttcaaatgtgtgacagagggactagattcatcacttactaactcctgcagaaagaactgagaaaaatagacagtattagagggggaccagtttcacacagacaaggaagaactattcagcaatcaattccgttcaaagataaaatggactgttatagtgggggtgagctccctacctctgagggtatttcaagtagagataggaggacctcctggtaggaaatttgcatacggtgggagattgtacgtgatatggcacctccatctgaaagagtctatattgagggcaggctggagtcacacatgggaataagccaggcgaccctcccatctgccatctgtgatttaattccacagtcgcagaacggatggcatgtcacccactcctccaaacccacctctagcaaaggtcccaaatccttcctatctctcacagtcatgctttcttccactcaggcattgctgttgcagaaactttcagccacatccacagcatctataatgccagcctcaagaaatattttctcattaccttcttcctgttcagcttcgccatcggattttatctgctgctcaagggactgggtgtagacctcctgtggactctggagaaagcccagaggtggtgcgagcagccagaatgggtccacattgacaccacaccctttgccagcctcctcaagaacctgggcacgctctttggcctggggctggctctcaactccagcatgtacagggagagctgcaaggggaaactcagcaagtggctcccattccgcctcagctctattgtagcctccctcgtcctcctgcacgtctttgactccttgaaacccccatcccaagtcgagctggtcttctacgtcttgtccttctgcaagagtgcggtagtgcccctggcatccgtcagtgtcatcccctactgcctcgcccaggtcctgggccagccgcacaagaagtcgttgtaagagatgtggagtcttcggtgtttaaagtcaacaaccatgccagggattgaggaggactactatttgaagcaatgggcactggtatttggagcaagtgacatgccatccattctgccgtcgtggaattaaatcacggatggcagattggagggtcgcctggcttattcccatgtgtgactccagcctgccctcagcacagactctttcagatggaggtgccatatcacgtacaccatatgcaagtttcccgccaggaggtcctcctctctctacttgaatactctcacaagtagggagctcactcccactggaacagcccattttatctttgaatggtcttctgccagcccattttgaggccagaggtgctgtcagctcaggtggtcctcttttacaatcctaatcatattgggtaatgtttttgaaaagctaatgaagctattgagaaagacctgttgctagaagttgggttgttctggattttcccctgaagacttacttattcttccgtcacatatacaaaagcaagacttccaggtagggccagctcacaagcccaggctggagatcctaactgagaattttctacctgtgttcattcttaccgagaaaaggagaaaggagctctgaatctgataggaaaagaaggctgcctaaggaggagtttttagtatgtggcgtatcatgcaagtgctatgccaagccatgtctaaatggctttaattatatagtaatgcactctcagtaatgggggaccagcttaagtataattaatagatggttagtggggtaattctgcttctagtattttttttactgtgcatacatgttcatcgtatttccttggatttctgaatggctgcagtgacccagatattgcactaggtcaaaacattcaggtatagctgacatctcctctatcacattacatcatcctccttataagcccagctctgctttttccagattcttccactggctccacatccaccccactggatcttcagaaggctagagggcgactctggtggtgcttttgtatgtttcaattaggctctgaaatcttgggcaaaatgacaaggggagggccaggattcctctctcaggtcactccagtgttacttttaattcctagagggtaaatatgactcctttctctatcccaagccaaccaagagcacattcttaaaggaaaagtcaacatcttctctctttttttttttttttgagacagggtctcactatgttgcccaggctgctcttgaattcctgggctcaagcagtcctcccaccctaccacagcgtcccgcgtagctgggactacaggtgcaagccactatgtccagctagccaactcctccttgcctgcttttctttttttttctttttttgagacggcgcacctatcacccaggctggagtggagtggcacgatcttggctcactgcaacctcttcctcctggttcaagcgattctcatgtctcagcctcctcagtagctaggactaccggcgtgcaccaccatgccaggctaatttttatatttttagaattttagaagagatgggatttcatcatgttggccaggctggtctcgaactcctgacctcaagtgatccacctgccttggcctcccaaggtgctaggattacaggcatgagccaccgcaccgggccctccttgcctgtttttcaatctcatctgatatgcagagtatttctgccccacccacctaccccccaaaaaaagctgaagcctatttatttgaaagtccttgtttttgctactaattatatagtataccatacattatcattcaaaacaaccatcctgctcataacatctttgaaaagaaaaatatatatgtgcagtattttattaaagcaacattttatttaagaataaagtcttgttaattactatattttagatgcaatgtgatctgaagtttctaattctggcccaactaaatttctagctctgtttccctaaacaaataatttggtttctctgtgcctgcattttccctttggagaagaaaagtgctctctcttgagttgaccgagagtcccattagggatagggagacttaaatgcatccacaggggcacaggcagagttgagcacataaacggaggcccaaaatcagcatagaaccagaaagattcagagttggccaagaatgaacattggctaccagaccacaagtcagcatgagttgctctatggcatcaaattgcaacttgagagtagatgggcagggtcactatcaaattaagcaatcagggcacacaagttgcagtaacacaacaagactaggccagctctggaatccagtaactcagtgtcagcaaggttttgggttatagttcaagaaagtctaaacagagccagtcacagcaccaaggaatgctcaagggagctattgcaggtttctctgctaagagatttatttcatcctgggtgcagggttcgacctccaaaggcctcaaatcatcaccgtatcaatggatttcctgagggtaagctccgctatttcacacctgaactccggagtctgtatattcagggaagattgcattctcctactggatttgggctctcagagggcgttgtgggaaccaggcccctcacagaatcaaatggtcccaaccagggagaaagaaaatagtcttttttttttttttaatagagatgggggtctcactatgctgcccaggctggtcttgaactcctgggttcaagtgatcctcctgcctcagcctcccaaagtgctgggattacagtgtgagccactgcgcttggccagaaatggttttgatctgtctgaactgaaccctactgcttaggcatagccccatccttgataatctatttgctcccaaggaccaagtccaagatccttacaagaaaggtctgccagaaagtaaatactgcccccactccctgaagtttatgaggttgataagaaaacataacagataaagtttattgagtgctaactttatgcca

SEQ ID NO: 103 - RNA, 4164 nt, Homo sapiens
  source 1..4164: mol_type = other RNA
agcagagcaatcaccaccaagcctggaataactgcaagggctctgctgacatcttcctgaggtgccaaggaaatgaggatggaggaaggaatgaatgttctccatgactttgggatccagtcaacacattacctccaggtgaattaccaagactcccaggactggttcatcttggtgtccgtgatcgcagacctcaggaatgccttctacgtcctcttccccatctggttccatcttcaggaagctgtgggcattaaactcctttgggtagctgtgattggagactggctcaacctcgtctttaagtggattctctttggacagcgtccatactggtgggttttggatactgactactacagcaacacttccgtgcccctgataaagcagttccctgtaacctgtgagactggaccagggagcccctctggccatgccatgggcacagcaggtgtatactacgtgatggtcacatctactctttccatctttcagggaaagataaagccgacctacagatttcggtgcttgaatgtcattttgtggttgggattctgggctgtgcagctgaatgtctgtctgtcacgaatctaccttgctgctcattttcctcatcaagttgttgctggagtcctgtcaggcattgctgttgcagaaactttcagccacatccacagcatctataatgccagcctcaagaaatattttctcattaccttcttcctgttcagcttcgccatcggattttatctgctgctcaagggactgggtgtagacctcctgtggactctggagaaagcccagaggtggtgcgagcagccagaatgggtccacattgacaccacaccctttgccagcctcctcaagaacctgggcacgctctttggcctggggctggctctcaactccagcatgtacagggagagctgcaaggggaaactcagcaagtggctcccattccgcctcagctctattgtagcctccctcgtcctcctgcacgtctttgactccttgaaacccccatcccaagtcgagctggtcttctacgtcttgtccttctgcaagagtgcggtagtgcccctggcatccgtcagtgtcatcccctactgcctcgcccaggtcctgggccagccgcacaagaagtcgttgtaagagatgtggagtcttcggtgtttaaagtcaacaaccatgccagggattgaggaggactactatttgaagcaatgggcactggtatttggagcaagtgacatgccatccattctgccgtcgtggaattaaatcacggatggcagattggagggtcgcctggcttattcccatgtgtgactccagcctgccctcagcacagactctttcagatggaggtgccatatcacgtacaccatatgcaagtttcccgccaggaggtcctcctctctctacttgaatactctcacaagtagggagctcactcccactggaacagcccattttatctttgaatggtcttctgccagcccattttgaggccagaggtgctgtcagctcaggtggtcctcttttacaatcctaatcatattgggtaatgtttttgaaaagctaatgaagctattgagaaagacctgttgctagaagttgggttgttctggattttcccctgaagacttacttattcttccgtcacatatacaaaagcaagacttccaggtagggccagctcacaagcccaggctggagatcctaactgagaattttctacctgtgttcattcttaccgagaaaaggagaaaggagctctgaatctgataggaaaagaaggctgcctaaggaggagtttttagtatgtggcgtatcatgcaagtgctatgccaagccatgtctaaatggctttaattatatagtaatgcactctcagtaatgggggaccagcttaagtataattaatagatggttagtggggtaattctgcttctagtattttttttactgtgcatacatgttcatcgtatttccttggatttctgaatggctgcagtgacccagatattgcactaggtcaaaacattcaggtatagctgacatctcctctatcacattacatcatcctccttataagcccagctctgctttttccagattcttccactggctccacatccaccccactggatcttcagaaggctagagggcgactctggtggtgcttttgtatgtttcaattaggctctgaaatcttgggcaaaatgacaaggggagggccaggattcctctctcaggtcactccagtgttacttttaattcctagagggtaaatatgactcctttctctatcccaagccaaccaagagcacattcttaaaggaaaagtcaacatcttctctctttttttttttttttgagacagggtctcactatgttgcccaggctgctcttgaattcctgggctcaagcagtcctcccaccctaccacagcgtcccgcgtagctgggactacaggtgcaagccactatgtccagctagccaactcctccttgcctgcttttctttttttttctttttttgagacggcgcacctatcacccaggctggagtggagtggcacgatcttggctcactgcaacctcttcctcctggttcaagcgattctcatgtctcagcctcctcagtagctaggactaccggcgtgcaccaccatgccaggctaatttttatatttttagaattttagaagagatgggatttcatcatgttggccaggctggtctcgaactcctgacctcaagtgatccacctgccttggcctcccaaggtgctaggattacaggcatgagccaccgcaccgggccctccttgcctgtttttcaatctcatctgatatgcagagtatttctgccccacccacctaccccccaaaaaaagctgaagcctatttatttgaaagtccttgtttttgctactaattatatagtataccatacattatcattcaaaacaaccatcctgctcataacatctttgaaaagaaaaatatatatgtgcagtattttattaaagcaacattttatttaagaataaagtcttgttaattactatattttagatgcaatgtgatctgaagtttctaattctggcccaactaaatttctagctctgtttccctaaacaaataatttggtttctctgtgcctgcattttccctttggagaagaaaagtgctctctcttgagttgaccgagagtcccattagggatagggagacttaaatgcatccacaggggcacaggcagagttgagcacataaacggaggcccaaaatcagcatagaaccagaaagattcagagttggccaagaatgaacattggctaccagaccacaagtcagcatgagttgctctatggcatcaaattgcaacttgagagtagatgggcagggtcactatcaaattaagcaatcagggcacacaagttgcagtaacacaacaagactaggccagctctggaatccagtaactcagtgtcagcaaggttttgggttatagttcaagaaagtctaaacagagccagtcacagcaccaaggaatgctcaagggagctattgcaggtttctctgctaagagatttatttcatcctgggtgcagggttcgacctccaaaggcctcaaatcatcaccgtatcaatggatttcctgagggtaagctccgctatttcacacctgaactccggagtctgtatattcagggaagattgcattctcctactggatttgggctctcagagggcgttgtgggaaccaggcccctcacagaatcaaatggtcccaaccagggagaaagaaaatagtcttttttttttttttaatagagatgggggtctcactatgctgcccaggctggtcttgaactcctgggttcaagtgatcctcctgcctcagcctcccaaagtgctgggattacagtgtgagccactgcgcttggccagaaatggttttgatctgtctgaactgaaccctactgcttaggcatagccccatccttgataatctatttgctcccaaggaccaagtccaagatccttacaagaaaggtctgccagaaagtaaatactgcccccactccctgaagtttatgaggttgataagaaaacataacagataaagtttattgagtgctaactttatgcca

SEQ ID NO: 104 - RNA, 987 nt, Homo sapiens
  source 1..987: mol_type = other RNA
atagcagagcaatcaccaccaagcctggaataactgcaagggctctgctgacatcttcctgaggtgccaaggaaatgaggatggaggaaggaatgaatgttctccatgactttgggatccagtcaacacattacctccaggtgaattaccaagactcccaggactggttcatcttggtgtccgtgatcgcagacctcaggaatgccttctacgtcctcttccccatctggttccatcttcaggaagctgtgggcattaaactcctttgggtagctgtgattggagactggctcaacctcgtctttaagtggattctctttggacagcgtccatactggtgggttttggatactgactactacagcaacacttccgtgcccctgataaagcagttccctgtaacctgtgagactggaccagggaaagataaagccgacctacagatttcggtgcttgaatgtcattttgtggttgggattctgggctgtgcagctgaatgtctgtctgtcacgaatctaccttgctgctcattttcctcatcaagttgttgctggagtcctgtcaggcattgctgttgcagaaactttcagccacatccacagcatctataatgccagcctcaagaaatattttctcattaccttcttcctgttcagcttcgccatcggattttatctgctgctcaagggactgggtgtagacctcctgtggactctggagaaagcccagaggtggtgcgagcagccagaatgggtccacattgacaccacaccctttgccagcctcctcaagaacctgggcacgctctttggcctggggctggctctcaactccagcatgtacagggagagctgcaaggggaaactcagcaagtggctcccattccgcctcagctctattgtagcctccctcgtcctcctgcacgtctttgactccttgaaacccccatcccaagtcgagctggtcttctacgtcttgtccttctgc

SEQ ID NO: 105 - RNA, 1097 nt, Homo sapiens
  source 1..1097: mol_type = other RNA
gcagagcaatcaccaccaagcctggaataactgcaagggctctgctgacatcttcctgaggtgccaaggaaatgaggatggaggaaggaatgaatgttctccatgactttgggatccagtcaacacattacctccaggtgaattaccaagactcccaggactggttcatcttggtgtccgtgatcgcagacctcaggaatgccttctacgtcctcttccccatctggttccatcttcaggaagctgtgggcattaaactcctttgggtagctgtgattggagactggctcaacctcgtctttaagtggattctctttggacagcgtccatactggtgggttttggatactgactactacagcaacacttccgtgcccctgataaagcagttccctgtaacctgtgagactggaccagggagcccctctggccatgccatgggcacagcaggtgtatactacgtgatggtcacatctactctttccatctttcagggaaagataaagccgacctacagatttcggcattgctgttgcagaaactttcagccacatccacagcatctataatgccagcctcaagaaatattttctcattaccttcttcctgttcagcttcgccatcggattttatctgctgctcaagggactgggtgtagacctcctgtggactctggagaaagcccagaggtggtgcgagcagccagaatgggtccacattgacaccacaccctttgccagcctcctcaagaacctgggcacgctctttggcctggggctggctctcaactccagcatgtacagggagagctgcaaggggaaactcagcaagtggctcccattccgcctcagctctattgtagcctccctcgtcctcctgcacgtctttgactccttgaaacccccatcccaagtcgagctggtcttctacgtcttgtccttctgcaagagtgcggtagtgcccctggcatccgtcagtgtcatcccctactgcctcgcccaggtcctgggccagccgcacaagaagtcgttgtaagagatgtggagtcttcggtgtttaaagtcaacaaccatgccagggattgaggaggactacta

SEQ ID NO: 106 - RNA, 4087 nt, Homo sapiens
  source 1..4087: mol_type = other RNA
agcagagcaatcaccaccaagcctggaataactgcaagggctctgctgacatcttcctgaggtgccaaggaaatgaggatggaggaaggaatgaatgttctccatgactttgggatccagtcaacacattacctccaggtgaattaccaagactcccaggactggttcatcttggtgtccgtgatcgcagacctcaggaatgccttctacgtcctcttccccatctggttccatcttcaggaagctgtgggcattaaactcctttgggtagctgtgattggagactggctcaacctcgtctttaagtggattctctttggacagcgtccatactggtgggttttggatactgactactacagcaacacttccgtgcccctgataaagcagttccctgtaacctgtgagactggaccagggaaagataaagccgacctacagatttcggtgcttgaatgtcattttgtggttgggattctgggctgtgcagctgaatgtctgtctgtcacgaatctaccttgctgctcattttcctcatcaagttgttgctggagtcctgtcaggcattgctgttgcagaaactttcagccacatccacagcatctataatgccagcctcaagaaatattttctcattaccttcttcctgttcagcttcgccatcggattttatctgctgctcaagggactgggtgtagacctcctgtggactctggagaaagcccagaggtggtgcgagcagccagaatgggtccacattgacaccacaccctttgccagcctcctcaagaacctgggcacgctctttggcctggggctggctctcaactccagcatgtacagggagagctgcaaggggaaactcagcaagtggctcccattccgcctcagctctattgtagcctccctcgtcctcctgcacgtctttgactccttgaaacccccatcccaagtcgagctggtcttctacgtcttgtccttctgcaagagtgcggtagtgcccctggcatccgtcagtgtcatcccctactgcctcgcccaggtcctgggccagccgcacaagaagtcgttgtaagagatgtggagtcttcggtgtttaaagtcaacaaccatgccagggattgaggaggactactatttgaagcaatgggcactggtatttggagcaagtgacatgccatccattctgccgtcgtggaattaaatcacggatggcagattggagggtcgcctggcttattcccatgtgtgactccagcctgccctcagcacagactctttcagatggaggtgccatatcacgtacaccatatgcaagtttcccgccaggaggtcctcctctctctacttgaatactctcacaagtagggagctcactcccactggaacagcccattttatctttgaatggtcttctgccagcccattttgaggccagaggtgctgtcagctcaggtggtcctcttttacaatcctaatcatattgggtaatgtttttgaaaagctaatgaagctattgagaaagacctgttgctagaagttgggttgttctggattttcccctgaagacttacttattcttccgtcacatatacaaaagcaagacttccaggtagggccagctcacaagcccaggctggagatcctaactgagaattttctacctgtgttcattcttaccgagaaaaggagaaaggagctctgaatctgataggaaaagaaggctgcctaaggaggagtttttagtatgtggcgtatcatgcaagtgctatgccaagccatgtctaaatggctttaattatatagtaatgcactctcagtaatgggggaccagcttaagtataattaatagatggttagtggggtaattctgcttctagtattttttttactgtgcatacatgttcatcgtatttccttggatttctgaatggctgcagtgacccagatattgcactaggtcaaaacattcaggtatagctgacatctcctctatcacattacatcatcctccttataagcccagctctgctttttccagattcttccactggctccacatccaccccactggatcttcagaaggctagagggcgactctggtggtgcttttgtatgtttcaattaggctctgaaatcttgggcaaaatgacaaggggagggccaggattcctctctcaggtcactccagtgttacttttaattcctagagggtaaatatgactcctttctctatcccaagccaaccaagagcacattcttaaaggaaaagtcaacatcttctctctttttttttttttttgagacagggtctcactatgttgcccaggctgctcttgaattcctgggctcaagcagtcctcccaccctaccacagcgtcccgcgtagctgggactacaggtgcaagccactatgtccagctagccaactcctccttgcctgcttttctttttttttctttttttgagacggcgcacctatcacccaggctggagtggagtggcacgatcttggctcactgcaacctcttcctcctggttcaagcgattctcatgtctcagcctcctcagtagctaggactaccggcgtgcaccaccatgccaggctaatttttatatttttagaattttagaagagatgggatttcatcatgttggccaggctggtctcgaactcctgacctcaagtgatccacctgccttggcctcccaaggtgctaggattacaggcatgagccaccgcaccgggccctccttgcctgtttttcaatctcatctgatatgcagagtatttctgccccacccacctaccccccaaaaaaagctgaagcctatttatttgaaagtccttgtttttgctactaattatatagtataccatacattatcattcaaaacaaccatcctgctcataacatctttgaaaagaaaaatatatatgtgcagtattttattaaagcaacattttatttaagaataaagtcttgttaattactatattttagatgcaatgtgatctgaagtttctaattctggcccaactaaatttctagctctgtttccctaaacaaataatttggtttctctgtgcctgcattttccctttggagaagaaaagtgctctctcttgagttgaccgagagtcccattagggatagggagacttaaatgcatccacaggggcacaggcagagttgagcacataaacggaggcccaaaatcagcatagaaccagaaagattcagagttggccaagaatgaacattggctaccagaccacaagtcagcatgagttgctctatggcatcaaattgcaacttgagagtagatgggcagggtcactatcaaattaagcaatcagggcacacaagttgcagtaacacaacaagactaggccagctctggaatccagtaactcagtgtcagcaaggttttgggttatagttcaagaaagtctaaacagagccagtcacagcaccaaggaatgctcaagggagctattgcaggtttctctgctaagagatttatttcatcctgggtgcagggttcgacctccaaaggcctcaaatcatcaccgtatcaatggatttcctgagggtaagctccgctatttcacacctgaactccggagtctgtatattcagggaagattgcattctcctactggatttgggctctcagagggcgttgtgggaaccaggcccctcacagaatcaaatggtcccaaccagggagaaagaaaatagtcttttttttttttttaatagagatgggggtctcactatgctgcccaggctggtcttgaactcctgggttcaagtgatcctcctgcctcagcctcccaaagtgctgggattacagtgtgagccactgcgcttggccagaaatggttttgatctgtctgaactgaaccctactgcttaggcatagccccatccttgataatctatttgctcccaaggaccaagtccaagatccttacaagaaaggtctgccagaaagtaaatactgcccccactccctgaagtttatgaggttgataagaaaacataacagataaagtttattgagtgctaactttatgcca

SEQ ID NO: 107 - RNA, 3095 nt, Homo sapiens
  source 1..3095: mol_type = other RNA
tagcagagcaatcaccaccaagcctggaataactgcaagggctctgctgacatcttcctgaggtgccaaggaaatgaggatggaggaaggaatgaatgttctccatgactttgggatccagtcaacacattacctccaggtgaattaccaagactcccaggactggttcatcttggtgtccgtgatcgcagacctcaggaatgccttctacgtcctcttccccatctggttccatcttcaggaagctgtgggcattaaactcctttgggtagctgtgattggagactggctcaacctcgtctttaagtggattctctttggacagcgtccatactggtgggttttggatactgactactacagcaacacttccgtgcccctgataaagcagttccctgtaacctgtgagactggaccagggagcccctctggccatgccatgggcacagcaggtgtatactacgtgatggtcacatctactctttccatctttcagggaaagataaagccgacctacagatttcggtgcttgaatgtcattttgtggttgggattctgggctgtgcagctgaatgtctgtctgtcacgaatctaccttgctgctcattttcctcatcaagttgttgctggagtcctgtcaggcattgctgttacagaaactttcagccacatccacagcatctataatgccagcctcaagaaatattttctcattaccttcttcctgttcagcttcgccatcggattttatctgctgctcaagggactgggtgtagacctcctgtggactctggagaaagcccagaggtggtgcgagcagccagaatgggtccacattgacaccacaccctttgccagcctcctcaagaacctgggcacgctctttggcctggggctggctctcaactccagcatgtacagggagagctgcaaggggaaactcagcaagtggctcccattccgcctcagctctattgtagcctccctcgtcctcctgcacgtctttgactccttgaaacccccatcccaagtcgagctggtcttctacgtcttgtccttctgcaagagtgcggtagtgcccctggcatccgtcagtgtcatcccctactgcctcgcccaggtcctgggccagccgcacaagaagtcgttgtaagagatgtggagtcttcggtgtttaaagtcaacaaccatgccagggattgaggaggactactatttgaagcaatgggcactggtatttggagcaagtgacatgccatccattctgccgtcgtggaattaaatcacggatggcagattggagggtcgcctggcttattcccatgtgtgactccagcctgccctcagcacagactctttcagatggaggtgccatatcacgtacaccatatgcaagtttcccgccaggaggtcctcctctctctacttgaatactctcacaagtagggagctcactcccactggaacagcccattttatctttgaatggtcttctgccagcccattttgaggccagaggtgctgtcagctcaggtggtcctcttttacaatcctaatcatattgggtaatgtttttgaaaagctaatgaagctattgagaaagacctgttgctagaagttgggttgttctggattttcccctgaagacttacttattcttccgtcacatatacaaaagcaagacttccaggtagggccagctcacaagcccaggctggagatcctaactgagaattttctacctgtgttcattcttaccgagaaaaggagaaaggagctctgaatctgataggaaaagaaggctgcctaaggaggagtttttagtatgtggcgtatcatgcaagtgctatgccaagccatgtctaaatggctttaattatatagtaatgcactctcagtaatgggggaccagcttaagtataattaatagatggttagtggggtaattctgcttctagtattttttttactgtgcatacatgttcatcgtatttccttggatttctgaatggctgcagtgacccagatattgcactaggtcaaaacattcaggtatagctgacatctcctctatcacattacatcatcctccttataagcccagctctgctttttccagattcttccactggctccacatccaccccactggatcttcagaaggctagagggcgactctggtggtgcttttgtatgtttcaattaggctctgaaatcttgggcaaaatgacaaggggagggccaggattcctctctcaggtcactccagtgttacttttaattcctagagggtaaatatgactcctttctctatcccaagccaaccaagagcacattcttaaaggaaaagtcaacatcttctctctttttttttttttttgagacagggtctcactatgttgcccaggctgctcttgaattcctgggctcaagcagtcctcccaccctaccacagcgtcccgcgtagctggcatacaggtgcaagccactatgtccagctagccaactcctccttgcctgcttttctttttttttctttttttgagacggcgcacctatcacccaggctggagtggagtggcacgatcttggctcactgcaacctcttcctcctggttcaagcgattctcatgtctcagcctcctcagtagctaggactaccggcgtgcaccaccatgccaggctaatttttatatttttagaattttagaagagatgggatttcatcatgttggccaggctggtctcgaactcctgacctcaagtgatccacctgccttggcctcccaaggtgctaggattacaggcatgagccaccgcaccgggccctccttgcctgtttttcaatctcatctgatatgcagagtatttctgccccacccacctaccccccaaaaaaagctgaagcctatttatttgaaagtccttgtttttgctactaattatatagtataccatacattatcattcaaaacaaccatcctgctcataacatctttgaaaagaaaaatatatatgtgcagtattttattaaagcaacattttatttaagaataaagtcttgttaattactatattttagatgcaatgtgatc

SEQ ID NO: 108 - RNA, 1149 nt, Homo sapiens
  source 1..1149: mol_type = other RNA
agagcaatcaccaccaagcctggaataactgcaagggctctgctgacatcttcctgaggtgccaaggaaatgaggatggaggaaggaatgaatgttctccatgactttgggatccagtcaacacattacctccaggtgaattaccaagactcccaggactggttcatcttggtgtccgtgatcgcagacctcaggaatgccttctacgtcctcttccccatctggttccatcttcaggaagctgtgggcattaaactcctttgggtagctgtgattggagactggctcaacctcgtctttaagtggattctctttggacagcgtccatactggtgggttttggatactgactactacagcaacacttccgtgcccctgataaagcagttccctgtaacctgtgagactggaccagggagcccctctggccatgccatgggcacagcaggtgtatactacgtgatggtcacatctactctttccatctttcagggaaagataaagccgacctacagatttcggtgcttgaatgtcattttgtggttgggattctgggctgtgcagctgaatgtctgtctgtcacgaatctaccttgctgctcattttcctcatcaagttgttgctggagtcctgtcaggcattgctgttgcagaaactttcagccacatccacagcatctataatgccagcctcaagaaatattttctcattaccttcttcctgttcagcttcgccatcggattttatctgctgctcaagggactgggtgtagacctcctgtggactctggagaaagcccagaggtggtgcgagcagccagaatgggtccacattgacaccacaccctttgccagcctcctcaagaacctgggcacgctctttggcctggggctggctctcaactccagcatgtacagggagagctgcaaggggaaactcagcaagtggctcccattccgcctcagctctattgtagcctccctcgtcctcctgcacgtctttgactccttgaaacccccatcccaagtcgagctggtcttctacgtcttgtccttctgcaagagtgcggtagtgcccctggcatccgtcagtgtcatcccctactgcctcgcccaggtcctgggccagccgcacaagaagtcgttgtaa

SEQ ID NO: 109 - RNA, 2382 nt, Homo sapiens
  source 1..2382: mol_type = other RNA
tgcaagggctctgctgacatcttcctgaggtgccaaggaaatgaggatggaggaaggaatgaatgttctccatgactttgggatccagtcaacacattacctccaggtgaattaccaagactcccaggactggttcatcttggtgtccgtgatcgcagacctcaggaatgccttctacgtcctcttccccatctggttccatcttcaggaagctgtgggcattaaactcctttgggtagctgtgattggagactggctcaacctcgtctttaagtggattctctttggacagcgtccatactggtgggttttggatactgactactacagcaacacttccgtgcccctgataaagcagttccctgtaacctgtgagactggaccagggagcccctctggccatgccatgggcacagcaggtgtatactacgtgatggtcacatctactctttccatctttcagggaaagataaagccgacctacagatttcggtgcttgaatgtcattttgtggttgggattctgggctgtgcagctgaatgtctgtctgtcacgaatctaccttgctgctcattttcctcatcaagttgttgctggagtcctgtcaggcattgctgttgcagaaactttcagccacatccacagcatctataatgccagcctcaagaaatattttctcattaccttcttcctgttcagcttcgccatcggattttatctgctgctcaagggactgggtgtagacctcctgtggactctggagaaagcccagaggtggtgcgagcagccagaatgggtccacattgacaccacaccctttgccagcctcctcaagaacctgggcacgctctttggcctggggctggctctcaactccagcatgtacagggagagctgcaaggggaaactcagcaagtggctcccattccgcctcagctctattgtagcctccctcgtcctcctgcacgtctttgactccttgaaacccccatcccaagtcgagctggtcttctacgtcttgtccttctgcaagagtgcggtagtgcccctggcatccgtcagtgtcatcccctactgcctcgcccaggtcctgggccagccgcacaagaagtcgttgtaagagatgtggagtcttcggtgttcaaagtcaacaaccatgccagggattgaggaggactactatttgaagcaatgggcactggtatttggagcaagtgacatgccatccattctgccgtcgtggaattaaatcacggatggcagattggagggtcgcctggcttattcccatgtgtgactccagcctgccctcagcacagactctttcagatggaggtgccatatcacgtacaccatatgcaagtttcccgccaggaggtcctcctctctctacttgaatactctcacaagtagggagctcactcccactggaacagcccattttatctttgaatggtcttctgccagcccattttgaggccagaggtgctgtcagctcaggtggtcctcttttacaatcctaatcatattgggtaatgtttttgaaaagctaatgaagctattgagaaagacctgttgctagaagttgggttgttctggattttcccctgaagacttacttattcttccgtcacatatacaaaagcaagacttccaggtagggccagctcacaagcccaggctggagatcctaactgagaattttctacctgtgttcattcttaccgagaaaaggagaaaggagctctgaatctgataggaaaagaaggctgcctaaggaggagtttttagtatgtggcgtatcatgcaagtgctatgccaagccatgtctaaatggctttaattatatagtaatgcactctcagtaatgggggaccagcttaagtataattaatagatggttagtggggtaattctgcttctagtattttttttactgtgcatacatgttcatcgtatttccttggatttctgaatggctgcagtgacccagatattgcactaggtcaaaacattcaggtatagctgacatctcctctatcacattacatcatcctccttataagcccagctctgctttttccagattcttccactggctccacatccaccccactggatcttcagaaggctagagggcgactctggtggtgcttttgtatgtttcaattaggctctgaaatcttgggcaaaatgacaaggggagggccaggattcctctctcaggtcactccagtgttacttttaattcctagagggtaaatatgactcctttctctatcccaagccaaccaagagcacattcttaaaggaaaagtcaacatcttctctcttttttttttttttttttgagacagggtctcactatgttgcccaggctgc

SEQ ID NO: 110 - DNA, 4164 bp, Homo sapiens
  source 1..4164: mol_type = genomic DNA
agcagagcaatcaccaccaagcctggaataactgcaagggctctgctgacatcttcctgaggtgccaaggaaatgaggatggaggaaggaatgaatgttctccatgactttgggatccagtcaacacattacctccaggtgaattaccaagactcccaggactggttcatcttggtgtccgtgatcgcagacctcaggaatgccttctacgtcctcttccccatctggttccatcttcaggaagctgtgggcattaaactcctttgggtagctgtgattggagactggctcaacctcgtctttaagtggattctctttggacagcgtccatactggtgggttttggatactgactactacagcaacacttccgtgcccctgataaagcagttccctgtaacctgtgagactggaccagggagcccctctggccatgccatgggcacagcaggtgtatactacgtgatggtcacatctactctttccatctttcagggaaagataaagccgacctacagatttcggtgcttgaatgtcattttgtggttgggattctgggctgtgcagctgaatgtctgtctgtcacgaatctaccttgctgctcattttcctcatcaagttgttgctggagtcctgtcaggcattgctgttgcagaaactttcagccacatccacagcatctataatgccagcctcaagaaatattttctcattaccttcttcctgttcagcttcgccatcggattttatctgctgctcaagggactgggtgtagacctcctgtggactctggagaaagcccagaggtggtgcgagcagccagaatgggtccacattgacaccacaccctttgccagcctcctcaagaacctgggcacgctctttggcctggggctggctctcaactccagcatgtacagggagagctgcaaggggaaactcagcaagtggctcccattccgcctcagctctattgtagcctccctcgtcctcctgcacgtctttgactccttgaaacccccatcccaagtcgagctggtcttctacgtcttgtccttctgcaagagtgcggtagtgcccctggcatccgtcagtgtcatcccctactgcctcgcccaggtcctgggccagccgcacaagaagtcgttgtaagagatgtggagtcttcggtgtttaaagtcaacaaccatgccagggattgaggaggactactatttgaagcaatgggcactggtatttggagcaagtgacatgccatccattctgccgtcgtggaattaaatcacggatggcagattggagggtcgcctggcttattcccatgtgtgactccagcctgccctcagcacagactctttcagatggaggtgccatatcacgtacaccatatgcaagtttcccgccaggaggtcctcctctctctacttgaatactctcacaagtagggagctcactcccactggaacagcccattttatctttgaatggtcttctgccagcccattttgaggccagaggtgctgtcagctcaggtggtcctcttttacaatcctaatcatattgggtaatgtttttgaaaagctaatgaagctattgagaaagacctgttgctagaagttgggttgttctggattttcccctgaagacttacttattcttccgtcacatatacaaaagcaagacttccaggtagggccagctcacaagcccaggctggagatcctaactgagaattttctacctgtgttcattcttaccgagaaaaggagaaaggagctctgaatctgataggaaaagaaggctgcctaaggaggagtttttagtatgtggcgtatcatgcaagtgctatgccaagccatgtctaaatggctttaattatatagtaatgcactctcagtaatgggggaccagcttaagtataattaatagatggttagtggggtaattctgcttctagtattttttttactgtgcatacatgttcatcgtatttccttggatttctgaatggctgcagtgacccagatattgcactaggtcaaaacattcaggtatagctgacatctcctctatcacattacatcatcctccttataagcccagctctgctttttccagattcttccactggctccacatccaccccactggatcttcagaaggctagagggcgactctggtggtgcttttgtatgtttcaattaggctctgaaatcttgggcaaaatgacaaggggagggccaggattcctctctcaggtcactccagtgttacttttaattcctagagggtaaatatgactcctttctctatcccaagccaaccaagagcacattcttaaaggaaaagtcaacatcttctctctttttttttttttttgagacagggtctcactatgttgcccaggctgctcttgaattcctgggctcaagcagtcctcccaccctaccacagcgtcccgcgtagctgggactacaggtgcaagccactatgtccagctagccaactcctccttgcctgcttttctttttttttctttttttgagacggcgcacctatcacccaggctggagtggagtggcacgatcttggctcactgcaacctcttcctcctggttcaagcgattctcatgtctcagcctcctcagtagctaggactaccggcgtgcaccaccatgccaggctaatttttatatttttagaattttagaagagatgggatttcatcatgttggccaggctggtctcgaactcctgacctcaagtgatccacctgccttggcctcccaaggtgctaggattacaggcatgagccaccgcaccgggccctccttgcctgtttttcaatctcatctgatatgcagagtatttctgccccacccacctaccccccaaaaaaagctgaagcctatttatttgaaagtccttgtttttgctactaattatatagtataccatacattatcattcaaaacaaccatcctgctcataacatctttgaaaagaaaaatatatatgtgcagtattttattaaagcaacattttatttaagaataaagtcttgttaattactatattttagatgcaatgtgatctgaagtttctaattctggcccaactaaatttctagctctgtttccctaaacaaataatttggtttctctgtgcctgcattttccctttggagaagaaaagtgctctctcttgagttgaccgagagtcccattagggatagggagacttaaatgcatccacaggggcacaggcagagttgagcacataaacggaggcccaaaatcagcatagaaccagaaagattcagagttggccaagaatgaacattggctaccagaccacaagtcagcatgagttgctctatggcatcaaattgcaacttgagagtagatgggcagggtcactatcaaattaagcaatcagggcacacaagttgcagtaacacaacaagactaggccagctctggaatccagtaactcagtgtcagcaaggttttgggttatagttcaagaaagtctaaacagagccagtcacagcaccaaggaatgctcaagggagctattgcaggtttctctgctaagagatttatttcatcctgggtgcagggttcgacctccaaaggcctcaaatcatcaccgtatcaatggatttcctgagggtaagctccgctatttcacacctgaactccggagtctgtatattcagggaagattgcattctcctactggatttgggctctcagagggcgttgtgggaaccaggcccctcacagaatcaaatggtcccaaccagggagaaagaaaatagtcttttttttttttttaatagagatgggggtctcactatgctgcccaggctggtcttgaactcctgggttcaagtgatcctcctgcctcagcctcccaaagtgctgggattacagtgtgagccactgcgcttggccagaaatggttttgatctgtctgaactgaaccctactgcttaggcatagccccatccttgataatctatttgctcccaaggaccaagtccaagatccttacaagaaaggtctgccagaaagtaaatactgcccccactccctgaagtttatgaggttgataagaaaacataacagataaagtttattgagtgctaactttatgcca

SEQ ID NO: 111 - DNA, 987 bp, Homo sapiens
  source 1..987: mol_type = genomic DNA
atagcagagcaatcaccaccaagcctggaataactgcaagggctctgctgacatcttcctgaggtgccaaggaaatgaggatggaggaaggaatgaatgttctccatgactttgggatccagtcaacacattacctccaggtgaattaccaagactcccaggactggttcatcttggtgtccgtgatcgcagacctcaggaatgccttctacgtcctcttccccatctggttccatcttcaggaagctgtgggcattaaactcctttgggtagctgtgattggagactggctcaacctcgtctttaagtggattctctttggacagcgtccatactggtgggttttggatactgactactacagcaacacttccgtgcccctgataaagcagttccctgtaacctgtgagactggaccagggaaagataaagccgacctacagatttcggtgcttgaatgtcattttgtggttgggattctgggctgtgcagctgaatgtctgtctgtcacgaatctaccttgctgctcattttcctcatcaagttgttgctggagtcctgtcaggcattgctgttgcagaaactttcagccacatccacagcatctataatgccagcctcaagaaatattttctcattaccttcttcctgttcagcttcgccatcggattttatctgctgctcaagggactgggtgtagacctcctgtggactctggagaaagcccagaggtggtgcgagcagccagaatgggtccacattgacaccacaccctttgccagcctcctcaagaacctgggcacgctctttggcctggggctggctctcaactccagcatgtacagggagagctgcaaggggaaactcagcaagtggctcccattccgcctcagctctattgtagcctccctcgtcctcctgcacgtctttgactccttgaaacccccatcccaagtcgagctggtcttctacgtcttgtccttctgc

SEQ ID NO: 112 - DNA, 1097 bp, Homo sapiens
  source 1..1097: mol_type = genomic DNA
gcagagcaatcaccaccaagcctggaataactgcaagggctctgctgacatcttcctgaggtgccaaggaaatgaggatggaggaaggaatgaatgttctccatgactttgggatccagtcaacacattacctccaggtgaattaccaagactcccaggactggttcatcttggtgtccgtgatcgcagacctcaggaatgccttctacgtcctcttccccatctggttccatcttcaggaagctgtgggcattaaactcctttgggtagctgtgattggagactggctcaacctcgtctttaagtggattctctttggacagcgtccatactggtgggttttggatactgactactacagcaacacttccgtgcccctgataaagcagttccctgtaacctgtgagactggaccagggagcccctctggccatgccatgggcacagcaggtgtatactacgtgatggtcacatctactctttccatctttcagggaaagataaagccgacctacagatttcggcattgctgttgcagaaactttcagccacatccacagcatctataatgccagcctcaagaaatattttctcattaccttcttcctgttcagcttcgccatcggattttatctgctgctcaagggactgggtgtagacctcctgtggactctggagaaagcccagaggtggtgcgagcagccagaatgggtccacattgacaccacaccctttgccagcctcctcaagaacctgggcacgctctttggcctggggctggctctcaactccagcatgtacagggagagctgcaaggggaaactcagcaagtggctcccattccgcctcagctctattgtagcctccctcgtcctcctgcacgtctttgactccttgaaacccccatcccaagtcgagctggtcttctacgtcttgtccttctgcaagagtgcggtagtgcccctggcatccgtcagtgtcatcccctactgcctcgcccaggtcctgggccagccgcacaagaagtcgttgtaagagatgtggagtcttcggtgtttaaagtcaacaaccatgccagggattgaggaggactacta

SEQ ID NO: 113 - DNA, 4087 bp, Homo sapiens
  source 1..4087: mol_type = genomic DNA
agcagagcaatcaccaccaagcctggaataactgcaagggctctgctgacatcttcctgaggtgccaaggaaatgaggatggaggaaggaatgaatgttctccatgactttgggatccagtcaacacattacctccaggtgaattaccaagactcccaggactggttcatcttggtgtccgtgatcgcagacctcaggaatgccttctacgtcctcttccccatctggttccatcttcaggaagctgtgggcattaaactcctttgggtagctgtgattggagactggctcaacctcgtctttaagtggattctctttggacagcgtccatactggtgggttttggatactgactactacagcaacacttccgtgcccctgataaagcagttccctgtaacctgtgagactggaccagggaaagataaagccgacctacagatttcggtgcttgaatgtcattttgtggttgggattctgggctgtgcagctgaatgtctgtctgtcacgaatctaccttgctgctcattttcctcatcaagttgttgctggagtcctgtcaggcattgctgttgcagaaactttcagccacatccacagcatctataatgccagcctcaagaaatattttctcattaccttcttcctgttcagcttcgccatcggattttatctgctgctcaagggactgggtgtagacctcctgtggactctggagaaagcccagaggtggtgcgagcagccagaatgggtccacattgacaccacaccctttgccagcctcctcaagaacctgggcacgctctttggcctggggctggctctcaactccagcatgtacagggagagctgcaaggggaaactcagcaagtggctcccattccgcctcagctctattgtagcctccctcgtcctcctgcacgtctttgactccttgaaacccccatcccaagtcgagctggtcttctacgtcttgtccttctgcaagagtgcggtagtgcccctggcatccgtcagtgtcatcccctactgcctcgcccaggtcctgggccagccgcacaagaagtcgttgtaagagatgtggagtcttcggtgtttaaagtcaacaaccatgccagggattgaggaggactactatttgaagcaatgggcactggtatttggagcaagtgacatgccatccattctgccgtcgtggaattaaatcacggatggcagattggagggtcgcctggcttattcccatgtgtgactccagcctgccctcagcacagactctttcagatggaggtgccatatcacgtacaccatatgcaagtttcccgccaggaggtcctcctctctctacttgaatactctcacaagtagggagctcactcccactggaacagcccattttatctttgaatggtcttctgccagcccattttgaggccagaggtgctgtcagctcaggtggtcctcttttacaatcctaatcatattgggtaatgtttttgaaaagctaatgaagctattgagaaagacctgttgctagaagttgggttgttctggattttcccctgaagacttacttattcttccgtcacatatacaaaagcaagacttccaggtagggccagctcacaagcccaggctggagatcctaactgagaattttctacctgtgttcattcttaccgagaaaaggagaaaggagctctgaatctgataggaaaagaaggctgcctaaggaggagtttttagtatgtggcgtatcatgcaagtgctatgccaagccatgtctaaatggctttaattatatagtaatgcactctcagtaatgggggaccagcttaagtataattaatagatggttagtggggtaattctgcttctagtattttttttactgtgcatacatgttcatcgtatttccttggatttctgaatggctgcagtgacccagatattgcactaggtcaaaacattcaggtatagctgacatctcctctatcacattacatcatcctccttataagcccagctctgctttttccagattcttccactggctccacatccaccccactggatcttcagaaggctagagggcgactctggtggtgcttttgtatgtttcaattaggctctgaaatcttgggcaaaatgacaaggggagggccaggattcctctctcaggtcactccagtgttacttttaattcctagagggtaaatatgactcctttctctatcccaagccaaccaagagcacattcttaaaggaaaagtcaacatcttctctctttttttttttttttgagacagggtctcactatgttgcccaggctgctcttgaattcctgggctcaagcagtcctcccaccctaccacagcgtcccgcgtagctgggactacaggtgcaagccactatgtccagctagccaactcctccttgcctgcttttctttttttttctttttttgagacggcgcacctatcacccaggctggagtggagtggcacgatcttggctcactgcaacctcttcctcctggttcaagcgattctcatgtctcagcctcctcagtagctaggactaccggcgtgcaccaccatgccaggctaatttttatatttttagaattttagaagagatgggatttcatcatgttggccaggctggtctcgaactcctgacctcaagtgatccacctgccttggcctcccaaggtgctaggattacaggcatgagccaccgcaccgggccctccttgcctgtttttcaatctcatctgatatgcagagtatttctgccccacccacctaccccccaaaaaaagctgaagcctatttatttgaaagtccttgtttttgctactaattatatagtataccatacattatcattcaaaacaaccatcctgctcataacatctttgaaaagaaaaatatatatgtgcagtattttattaaagcaacattttatttaagaataaagtcttgttaattactatattttagatgcaatgtgatctgaagtttctaattctggcccaactaaatttctagctctgtttccctaaacaaataatttggtttctctgtgcctgcattttccctttggagaagaaaagtgctctctcttgagttgaccgagagtcccattagggatagggagacttaaatgcatccacaggggcacaggcagagttgagcacataaacggaggcccaaaatcagcatagaaccagaaagattcagagttggccaagaatgaacattggctaccagaccacaagtcagcatgagttgctctatggcatcaaattgcaacttgagagtagatgggcagggtcactatcaaattaagcaatcagggcacacaagttgcagtaacacaacaagactaggccagctctggaatccagtaactcagtgtcagcaaggttttgggttatagttcaagaaagtctaaacagagccagtcacagcaccaaggaatgctcaagggagctattgcaggtttctctgctaagagatttatttcatcctgggtgcagggttcgacctccaaaggcctcaaatcatcaccgtatcaatggatttcctgagggtaagctccgctatttcacacctgaactccggagtctgtatattcagggaagattgcattctcctactggatttgggctctcagagggcgttgtgggaaccaggcccctcacagaatcaaatggtcccaaccagggagaaagaaaatagtcttttttttttttttaatagagatgggggtctcactatgctgcccaggctggtcttgaactcctgggttcaagtgatcctcctgcctcagcctcccaaagtgctgggattacagtgtgagccactgcgcttggccagaaatggttttgatctgtctgaactgaaccctactgcttaggcatagccccatccttgataatctatttgctcccaaggaccaagtccaagatccttacaagaaaggtctgccagaaagtaaatactgcccccactccctgaagtttatgaggttgataagaaaacataacagataaagtttattgagtgctaactttatgcca

SEQ ID NO: 114 - DNA, 3095 bp, Homo sapiens
  source 1..3095: mol_type = genomic DNA
tagcagagcaatcaccaccaagcctggaataactgcaagggctctgctgacatcttcctgaggtgccaaggaaatgaggatggaggaaggaatgaatgttctccatgactttgggatccagtcaacacattacctccaggtgaattaccaagactcccaggactggttcatcttggtgtccgtgatcgcagacctcaggaatgccttctacgtcctcttccccatctggttccatcttcaggaagctgtgggcattaaactcctttgggtagctgtgattggagactggctcaacctcgtctttaagtggattctctttggacagcgtccatactggtgggttttggatactgactactacagcaacacttccgtgcccctgataaagcagttccctgtaacctgtgagactggaccagggagcccctctggccatgccatgggcacagcaggtgtatactacgtgatggtcacatctactctttccatctttcagggaaagataaagccgacctacagatttcggtgcttgaatgtcattttgtggttgggattctgggctgtgcagctgaatgtctgtctgtcacgaatctaccttgctgctcattttcctcatcaagttgttgctggagtcctgtcaggcattgctgttacagaaactttcagccacatccacagcatctataatgccagcctcaagaaatattttctcattaccttcttcctgttcagcttcgccatcggattttatctgctgctcaagggactgggtgtagacctcctgtggactctggagaaagcccagaggtggtgcgagcagccagaatgggtccacattgacaccacaccctttgccagcctcctcaagaacctgggcacgctctttggcctggggctggctctcaactccagcatgtacagggagagctgcaaggggaaactcagcaagtggctcccattccgcctcagctctattgtagcctccctcgtcctcctgcacgtctttgactccttgaaacccccatcccaagtcgagctggtcttctacgtcttgtccttctgcaagagtgcggtagtgcccctggcatccgtcagtgtcatcccctactgcctcgcccaggtcctgggccagccgcacaagaagtcgttgtaagagatgtggagtcttcggtgtttaaagtcaacaaccatgccagggattgaggaggactactatttgaagcaatgggcactggtatttggagcaagtgacatgccatccattctgccgtcgtggaattaaatcacggatggcagattggagggtcgcctggcttattcccatgtgtgactccagcctgccctcagcacagactctttcagatggaggtgccatatcacgtacaccatatgcaagtttcccgccaggaggtcctcctctctctacttgaatactctcacaagtagggagctcactcccactggaacagcccattttatctttgaatggtcttctgccagcccattttgaggccagaggtgctgtcagctcaggtggtcctcttttacaatcctaatcatattgggtaatgtttttgaaaagctaatgaagctattgagaaagacctgttgctagaagttgggttgttctggattttcccctgaagacttacttattcttccgtcacatatacaaaagcaagacttccaggtagggccagctcacaagcccaggctggagatcctaactgagaattttctacctgtgttcattcttaccgagaaaaggagaaaggagctctgaatctgataggaaaagaaggctgcctaaggaggagtttttagtatgtggcgtatcatgcaagtgctatgccaagccatgtctaaatggctttaattatatagtaatgcactctcagtaatgggggaccagcttaagtataattaatagatggttagtggggtaattctgcttctagtattttttttactgtgcatacatgttcatcgtatttccttggatttctgaatggctgcagtgacccagatattgcactaggtcaaaacattcaggtatagctgacatctcctctatcacattacatcatcctccttataagcccagctctgctttttccagattcttccactggctccacatccaccccactggatcttcagaaggctagagggcgactctggtggtgcttttgtatgtttcaattaggctctgaaatcttgggcaaaatgacaaggggagggccaggattcctctctcaggtcactccagtgttacttttaattcctagagggtaaatatgactcctttctctatcccaagccaaccaagagcacattcttaaaggaaaagtcaacatcttctctctttttttttttttttgagacagggtctcactatgttgcccaggctgctcttgaattcctgggctcaagcagtcctcccaccctaccacagcgtcccgcgtagctggcatacaggtgcaagccactatgtccagctagccaactcctccttgcctgcttttctttttttttctttttttgagacggcgcacctatcacccaggctggagtggagtggcacgatcttggctcactgcaacctcttcctcctggttcaagcgattctcatgtctcagcctcctcagtagctaggactaccggcgtgcaccaccatgccaggctaatttttatatttttagaattttagaagagatgggatttcatcatgttggccaggctggtctcgaactcctgacctcaagtgatccacctgccttggcctcccaaggtgctaggattacaggcatgagccaccgcaccgggccctccttgcctgtttttcaatctcatctgatatgcagagtatttctgccccacccacctaccccccaaaaaaagctgaagcctatttatttgaaagtccttgtttttgctactaattatatagtataccatacattatcattcaaaacaaccatcctgctcataacatctttgaaaagaaaaatatatatgtgcagtattttattaaagcaacattttatttaagaataaagtcttgttaattactatattttagatgcaatgtgatc

SEQ ID NO: 115 - DNA, 1149 bp, Homo sapiens
  source 1..1149: mol_type = genomic DNA
agagcaatcaccaccaagcctggaataactgcaagggctctgctgacatcttcctgaggtgccaaggaaatgaggatggaggaaggaatgaatgttctccatgactttgggatccagtcaacacattacctccaggtgaattaccaagactcccaggactggttcatcttggtgtccgtgatcgcagacctcaggaatgccttctacgtcctcttccccatctggttccatcttcaggaagctgtgggcattaaactcctttgggtagctgtgattggagactggctcaacctcgtctttaagtggattctctttggacagcgtccatactggtgggttttggatactgactactacagcaacacttccgtgcccctgataaagcagttccctgtaacctgtgagactggaccagggagcccctctggccatgccatgggcacagcaggtgtatactacgtgatggtcacatctactctttccatctttcagggaaagataaagccgacctacagatttcggtgcttgaatgtcattttgtggttgggattctgggctgtgcagctgaatgtctgtctgtcacgaatctaccttgctgctcattttcctcatcaagttgttgctggagtcctgtcaggcattgctgttgcagaaactttcagccacatccacagcatctataatgccagcctcaagaaatattttctcattaccttcttcctgttcagcttcgccatcggattttatctgctgctcaagggactgggtgtagacctcctgtggactctggagaaagcccagaggtggtgcgagcagccagaatgggtccacattgacaccacaccctttgccagcctcctcaagaacctgggcacgctctttggcctggggctggctctcaactccagcatgtacagggagagctgcaaggggaaactcagcaagtggctcccattccgcctcagctctattgtagcctccctcgtcctcctgcacgtctttgactccttgaaacccccatcccaagtcgagctggtcttctacgtcttgtccttctgcaagagtgcggtagtgcccctggcatccgtcagtgtcatcccctactgcctcgcccaggtcctgggccagccgcacaagaagtcgttgtaa

SEQ ID NO: 116 - DNA, 2382 bp, Homo sapiens
  source 1..2382: mol_type = genomic DNA
tgcaagggctctgctgacatcttcctgaggtgccaaggaaatgaggatggaggaaggaatgaatgttctccatgactttgggatccagtcaacacattacctccaggtgaattaccaagactcccaggactggttcatcttggtgtccgtgatcgcagacctcaggaatgccttctacgtcctcttccccatctggttccatcttcaggaagctgtgggcattaaactcctttgggtagctgtgattggagactggctcaacctcgtctttaagtggattctctttggacagcgtccatactggtgggttttggatactgactactacagcaacacttccgtgcccctgataaagcagttccctgtaacctgtgagactggaccagggagcccctctggccatgccatgggcacagcaggtgtatactacgtgatggtcacatctactctttccatctttcagggaaagataaagccgacctacagatttcggtgcttgaatgtcattttgtggttgggattctgggctgtgcagctgaatgtctgtctgtcacgaatctaccttgctgctcattttcctcatcaagttgttgctggagtcctgtcaggcattgctgttgcagaaactttcagccacatccacagcatctataatgccagcctcaagaaatattttctcattaccttcttcctgttcagcttcgccatcggattttatctgctgctcaagggactgggtgtagacctcctgtggactctggagaaagcccagaggtggtgcgagcagccagaatgggtccacattgacaccacaccctttgccagcctcctcaagaacctgggcacgctctttggcctggggctggctctcaactccagcatgtacagggagagctgcaaggggaaactcagcaagtggctcccattccgcctcagctctattgtagcctccctcgtcctcctgcacgtctttgactccttgaaacccccatcccaagtcgagctggtcttctacgtcttgtccttctgcaagagtgcggtagtgcccctggcatccgtcagtgtcatcccctactgcctcgcccaggtcctgggccagccgcacaagaagtcgttgtaagagatgtggagtcttcggtgttcaaagtcaacaaccatgccagggattgaggaggactactatttgaagcaatgggcactggtatttggagcaagtgacatgccatccattctgccgtcgtggaattaaatcacggatggcagattggagggtcgcctggcttattcccatgtgtgactccagcctgccctcagcacagactctttcagatggaggtgccatatcacgtacaccatatgcaagtttcccgccaggaggtcctcctctctctacttgaatactctcacaagtagggagctcactcccactggaacagcccattttatctttgaatggtcttctgccagcccattttgaggccagaggtgctgtcagctcaggtggtcctcttttacaatcctaatcatattgggtaatgtttttgaaaagctaatgaagctattgagaaagacctgttgctagaagttgggttgttctggattttcccctgaagacttacttattcttccgtcacatatacaaaagcaagacttccaggtagggccagctcacaagcccaggctggagatcctaactgagaattttctacctgtgttcattcttaccgagaaaaggagaaaggagctctgaatctgataggaaaagaaggctgcctaaggaggagtttttagtatgtggcgtatcatgcaagtgctatgccaagccatgtctaaatggctttaattatatagtaatgcactctcagtaatgggggaccagcttaagtataattaatagatggttagtggggtaattctgcttctagtattttttttactgtgcatacatgttcatcgtatttccttggatttctgaatggctgcagtgacccagatattgcactaggtcaaaacattcaggtatagctgacatctcctctatcacattacatcatcctccttataagcccagctctgctttttccagattcttccactggctccacatccaccccactggatcttcagaaggctagagggcgactctggtggtgcttttgtatgtttcaattaggctctgaaatcttgggcaaaatgacaaggggagggccaggattcctctctcaggtcactccagtgttacttttaattcctagagggtaaatatgactcctttctctatcccaagccaaccaagagcacattcttaaaggaaaagtcaacatcttctctcttttttttttttttttttgagacagggtctcactatgttgcccaggctgc

SEQ ID NO: 117 - protein, 357 aa, Homo sapiens
MEEGMNVLHDFGIQSTHYLQVNYQDSQDWFILVSVIADLRNAFYVLFPIWFHLQEAVGIKLLWVAVIGDWLNLVFKWILFGQRPYWWVLDTDYYSNTSVPLIKQFPVTCETGPGSPSGHAMGTAGVYYVMVTSTLSIFQGKIKPTYRFRCLNVILWLGFWAVQLNVCLSRIYLAAHFPHQVVAGVLSGIAVAETFSHIHSIYNASLKKYFLITFFLFSFAIGFYLLLKGLGVDLLWTLEKAQRWCEQPEWVHIDTTPFASLLKNLGTLFGLGLALNSSMYRESCKGKLSKWLPFRLSSIVASLVLLHVFDSLKPPSQVELVFYVLSFCKSAVVPLASVSVIPYCLAQVLGQPHKKSL

SEQ ID NO: 118 - protein, 176 aa, Homo sapiens
MEEGMNVLHDFGIQSTHYLQVNYQDSQDWFILVSVIADLRNAFYVLFPIWFHLQEAVGIKLLWVAVIGDWLNLVFKWILFGQRPYWWVLDTDYYSNTSVPLIKQFPVTCETGPGKDKADLQISVLECHFVVGILGCAAECLSVTNLPCCSFSSSSCCWSPVRHCCCRNFQPHPQHL

SEQ ID NO: 119 - protein, 163 aa, Homo sapiens
MEEGMNVLHDFGIQSTHYLQVNYQDSQDWFILVSVIADLRNAFYVLFPIWFHLQEAVGIKLLWVAVIGDWLNLVFKWILFGQRPYWWVLDTDYYSNTSVPLIKQFPVTCETGPGSPSGHAMGTAGVYYVMVTSTLSIFQGKIKPTYRFRHCCCRNFQPHPQHL

SEQ ID NO: 120 - DNA, 235426 bp, Homo sapiens
  source 1..235426: mol_type = genomic DNA
aggcttttggccactaggagctggcggaggtgcagacctaaaggagcgttcgctagcagaggcgctgccggtgcggtgtgctacgcgcgcccacctcccggggaaggaacggcgaggccggggaccgtcgcggagatggatcgcgggccggcagcagtggcgtgcacgctgctcctggctctcgtcgcctgcctagcgccggccagtggccaaggtaagagcccagccagagcctctcgtggagcccccacttccccggctgtggcagggtcgggtccgcgggaggccggaggggagagcgtccgggcaggggctagggccgggcggcggcgcgggagctgctcccggtggggcgctcaggttgcttcgcgaagccggagcgggagcgcccctcttcgctcgccaggaactgagcggcagcaaacttgagaaagcagccccgccagtttcggtgacagcgcaccccacggagaccctgtctttgttcccacgggcgttggtccgatgctcctggaaagcactttgcgggagaacgaggttctccgccgtttgcagcctgccctccctagcggagttctctgctgggcggcgcggtcccgggctctgctcagagcgcagctttccacctgcagcgcccctcccgggatcccttcgcgcgcccagggccgcgggccagagcactcctcccaccaccggcgaaacttggtcccgcggtgacccccagagaccgctctcaccatacagatcatttacgagccaagataaggccgggaggtgggattggccgagagagtggctgagggactggagtcttttcttgaagttttcctttccagctgggagctgggggcttttgtgttgatgaatggggcccgtctgcatggccagagttttggggatcgaatgcagaaagtttctagtatgaagtgctttaaacttctctcaagttgtccgatagtttatgttttaacagaaacagagaagagggaaagagagggagaaagaagcggagagaataaaactagtaagaagggaagaggagagagcgtaagagaagcaaataggaataaggaaagaaggagggaagagaacgactggggcgggagaagagagagagagaggagagagaggagagagacagagagagagagagagagggagagagagagagagagagagagagacagagagagacagagagagacagagagagacagagagacagagacccggccgaggatgaatgggaagggcgaggaggaggctggaaccggcgagctctccccctggctttgcgttgctaggtagcagccgggagctgcgtgtgaccgaccaccagacagacagaggggacgctgctgccaccgcagggactaatctgtctgtggggatgggagagtcccccctttcccctcctgctccttccctcccgtcggacaacttaattgccctacaatgaaaatgaaacccctattgttgtaggattagccaaagcaataaattgattttcctggatcacatattggggttgatgggtggggaatgtggaagcccccatttacggaggagtgaggggagggcttgtggatgggccgtggcatgtattcaaatggttaatctgctttctttcctcaattcttagcgtaagctccttagagggaatcaagtaagtaattatacagcaactcctagcagcacccatttcagacttcctgggaagaagtttggaaaccctaacaaaccccacaggtcttgcaaaagtcttcagaaaggcaggagaggcaaggagagatcattaataaccttcctttgaacaccctttctcagtgttggtaacgcagaaagagggtttattattattgtgcagagtttgcacaatgcttagggttgtatctcatgtcctaaatatagctataggatttactatatgttcctgtcagtgcctggcaaaaggaaatcttaccttgattcatctatgtccttgtacaaccaaaacagatattctttttcctgggttgatgatttagtcactaaataaccaatacctactcttcttgatagttttttgcacccatccatcttccattctatgataataatatataataataatgtgtatagtaatagtaacctagcatacacatatatgtggcaggctttgttctaagcactttatacttattgactcaattaatcttcataatatcccttggaagtaagtactcttattatcactgttttacagatgagaaagtggaggcacagaacaattcagtaatttgtctcagttcatactgctagaaaatggcaaactcaagggattctgaattcagagtctataattgctacagtatacagtgtctggttttctctctctctctctctcttttttttttttttttttttgagagagacagaatctcgctctgtcacccaggctggagtgcagtggtgcaatctcggctcactgcaacctctgcctcccaggttcaagcgatcctcacacctcagcctcccaagtagctgggactacaagcccggggcaccatgcccagctaatattttgtatttttagtagaggcagggttttgctatgttggccaggccagtcttgaactcctgacctcaagtgatctgcccgcctaggcctcccaaagtgctaggattacaggtgtgagccactgcacctggcccgatttctcttttttcttttgtacaaaaaatgtcatgctccctaacttactgtccatgtttgaggttcccaaagaagctgaggggcaatatgcaactcgtaccacctgctgcttcataactgtggatctttttccagaatctctcctcaggtttctaagaccagaacccaagtctccccattcccagtcttcctacttgatcattttaagacgcatttcctctgaatgtcctctgcctgatacgttgagatttctagaatcctgttgtaatgatcctgacttaatatatgaagtaaaatccaatgagattgtaacagcctttatttaagcactaccttttaggtaggctaccattgcaaacttcgcatcactaaaaattggaggggaaaaaaaagagctctgagtattctatgtttagtctttgaaaaaaattataccacatctgttgttaaaaattatttgcattttccttatcttttgtgtaatgcttttcaagaaaaaacattttgcagagtctgaactcgagtcaagctgttgggttccaacattggctttaccactttctagctgtgtgaccttgggaaagtcaaccaactttgcatagctcagatggcttatctgcaaaattgacaagataataagagaatttacccaatgacatcttgtaagcataaagagataaaatatgccaagtgcttagcatggtgtaaagcatatagacagtgaaaataaactagaaaataatctaaaaatacaatatttttattatatttatcaacccttaaagtaacatattgttttgcttcctattcctatttccatttccaattttcaaatatacaaaggaaagtcttctttaagcatttttcactaacagttctctgaagacttctcagaccctagcatgtgattggaagattttttcttttttttttttttttttgagaaaatcgtattggccttaaacaaagttgtattctgtttactaattaaaaaaacttatttttcaaaaatagaaatggggtctcactgtgttgcccaggctggtcttgaactcttggcctcaaatgatcctcctacctctgcttcccaaagtgctgacattataggcaggagccaccttacctggtccaacattatattctttaatccaataaaaatgtggtaatgtttttaagagttagtatcagcttttatgacaattacatcttcacatgaagtttatatgtttaaaaggattgtgggggcaatagcaaacttgtatcgtttttattccatcacaactctggaacctcactgctgctttaatttcacagttgttggcttctctttctctacttgaaaaagtttctctttaccagtcttcataagacttctgcctgaactcccttcagtcatgcacctgtctcattttaatagaaactcagactttttacagctagagggaaccttagatatcaactggtctgcttgcattttttttttcttacagataagcaattagcccaggagggagaagaaaggggctgagaggatgaaagggaaggcggttaataggtttcttgcctaaggacatctagcctgtgacagagctaagatataaatttgcagtggaccattttttagattcatgccttctgaatgtccccagcctgtttggttggttgagatttctagattccttttggaatcctgacttgccagataaggcacagtctgataagcagatgaatcttaaaaacaattggatgggttacctgtccctggccaaagaggaatcctgtgataggttattacaaccatgtaccatgcgctttcagcttggtccagaactgatgccatgtcagtgcccctactcccaaagaccatacctccagatccatttttcaaattcttgagccatcaaagcgcattcctgaagatctttgggttttgtagtgcaggctgctgtaagactaggttttcagtcttactaaaggtaattattaggtcataatcattgttcatgttctctagtcaggcactgtaagaacactgaaaggtttttaaaatatttaaattaaaattttaaattatcatttaaaaataatgataccaggaacctagatgtatttcctgtgtaatcagaagcaagtgcattgtcatattggctttggagtttctgttaagtcctagtagctagaacaaggtaagtagaaagtagaaggtgctgagctgggcgtgggggctcatgcctgtaatcccagcactttgggatgctgaggcgggaggatcatgaggtcaggagatcgagacctgcctggccaacatggtgaaaccctgtttctatttaaaacacaaaaattagctgggcgtggtgacgcacacctgtaatcccagctactcgggaggctgaggcaggagaactgcttgaacacaggaggcagggattgcagtgagctgagattgtgccactgcactccagcctgggtgacagagcaagaatctgtctcaaaaataaaataaaataaaataaaataaaataaaataaaataaaataaaataaaataaaaataaataaaaaagaaaaaaaaaagaaaagaaagtagaaggtgcttatgaaagagtgttgaatggataggaaaggggttctcaaggttgactgcacgaatctagagcaactaaaaaaatactaattgtgaagccctattctagcatggaaaaaataagcttgatggaacctttggtataaatcaaatggttctatcgtatcctattaactttatagtcttgagtaattaaaaatttttaccactattgtgtattctgtgaatgtttattttattttttccatgaatatttattaaatatcaacagtgtgctgatgagtcaatagtatcaatactacagaaacattaaggaagatgagaactgaaaagaggtgtctacatatctcgcaattaaaatggactgcagttttgcatttaagattctgaaatagtcattgactcattcctaataaccctgcccaggatctcaccagcattagaaagattggagatgtttcagcatccgagttctgggatgcttcttgataatgatcagctagtagttgttttgaaatgtcaagagcatttctgtggttcttcacatgttcctaatgcaaatgtttccgaagtaatttcttgacagttacagtgttttgagatgaagtgggaagggcttgtgattttgaagttggaggatcttggtttgattcctacctctgccatttattatctgggaaatccagtaccacacatgctgggtgctctggggcagttttcttatctgtaaaatggacatatatctacctcacggggtggttatgcaaaggcaatgaatgtgaaatgtttaataaactgtgaagtctcatatagatttccattcatcattattacccaatacgagaattttactttttccaaacttgagaggaggaagatgttgcagtattttggtatcttctttaccgtgggtctgagaatgatgcacctgtgcatgttgttacatccttacagtggctaccacaacttcacatgttattcagtactgttatgttggtgaatgtcacaaaactaagttaaactgtctgaggcaaaaaaggaaggttattgaaatacatagttgaggctgggtgtggtggctcatgcctataaatctcagcactttgggagtctgaggtgagcggattgcttgagcctaggagtttgagaccagcctgggcaacatagtgagactccatctctacaaaaaatacaaaaaattagccaggaatggtggtgtgcccttgtggtcccagctacttgggaggctgaggtgagatgatcgcttgagcccaggaggtcgaggctacagtgagctgtgatcatgccactgcactccagcctcagcgacagagtgagaccctgtctcaaagaaaataaatacatagttgaaaagatacagataattaggttgatccatttgagattgattttttttcctatgcagaaatagtcaaatattggcaatttcatttggttcaacctaatataaaatggaggctcaaactatgtcaggccaatcttgtcttttttccgtctcctggctctgagatgactccattcttaaacatgttctcctttgatgtaaagcggctgtcagtggctctggagccacctcctatcagatcacatccactgggaaagaaaaagagtttttatcttagctattcccagcaaaagtttcagttgcatctcagggtctctacttaggtcataaactcattggagaaccaaccactgaatcccgggtcatgatgtgttcccatggcttaggcttgggctgtatactcagtctttgagatcatgtatgaaggggtggagtccagagagaaatgggggtaattattgggagaatggtgaacagaggctgggatgcaaaaataacaggtgttcagtataccttatcagataaaattgactgacgatgttattttcattttgtatgtgaagacacacttgaaaaagctacagaaatttctcaagagctggcagccctggggtaacttacagaattgaaaggaataaagtattggaaacattaagaaaaaagacatggtgatctgtgcccatgtgaccatgttgcaactttaagtttagaaggagaacaggagaaagaaggacttttagaaggtttatttggatcctaaagttttcttatttggagcagagctttgtgatagacaggaaagttctggaaaatgagctgagcgatcagactacaggatcccttaagtctggtgcagtatttcatttttctgtgaatcttaggctcctactccttttccaatttacttcactccaatgtttatgttcctaagagtttgtctgttttccaagcactagtcctttgctataaggatggggtagagagaaagaagcttaaagagtttgcagacaggttaagatgcttctgtggagacagaacacatcttggtgcacatctgagtgtccttagcacttcatctatggacttctttcataaatggtagaacacgtatccatcacaccttattggattaattcagaaatgccagatatatgtactctttgctgatggttactttgttggtctctaatttaagtcttatctctaatcacattagctgagaaaatggagacattatcattctaaaaataagatggttaacttttatattaggacacttctgatttaggatagcactgaaattcagtgcaaagaaatgtaagtctttcctagataatgacagattagacaatttgaagtttcacttttggtcattagccctcaggtcatgcctgacctcaaggttactggaaacagtgagaaatgaatgaaaggaggaaatgtaattaccattctgtgcattgaatagttgagccactgttaccatggatacaatggcgcatttattgtccagatcttgagatccaagtttgtaagcaatatccaaggtctcctttaaatttatgtactatcagcgaataacacatgaagattcctggtaactttgaaaataagtctttcctcactgatctactgattcacattaagtaagagcatgtgtacttttgaaggtgttgaggaaacctgaaaaagacgaaaaggaaagtagctacacttctgttatgctggacattcttggattcctctataaaaatattctgtcttatactgtcagtgatttgcttgtcactttgggcccagttctttggtttttatgtcattaacaaggagaaaatttcctgagtaaaggttgaaaaaatcaaaatcgtttatttttattttttgagacaaggtcttactttatcacccaggccagagagggtctcactttatcactcaggctggagtgcatggctccctgcagcctcaacttcccaggctgaagagatcctctccgcttaaccccacaagaagctgggactacagacacataccagcactcacagttaatttttatattttttgtagagatgaggtttctccatgttgttcaggctggcctcaaacccctgagctcaagtgatcctcccgcctcagcttcccaaagtgctgggattataggcgctagccaccatgcccggctgaaatcatttattttgtcaggaaattcttaaagttgaatttaagaatgaaagtattttatcagaaatatggcaatcctacccacattttaatctcactagaaggggggtgatacatgctagcatgtacttccacactggtttaattttgatgtggggaagggtgtggagaatactttttgttgcaagaaacagaaaacccaactcaaaatggcctacacaataaagggtatttcttggcttatgtgagtaaaaaatactgaggcagagtggggttcaggcgaggtgcagtcagggctccagttctctttctttgtgttttccttgaccctactcccccctaagtttcacctttgtgtgcggtctggcttcccatatgattctgatatggctgccagggcaaatggggctacgtgtttccttgatcctatccagggggaatccaactttgagaaggttttagttatgttctcaaaagtattatttcatcacaataacttacagattgttagaatttctaaggaccctagacaaagtcagctagctccccaaacttgacatatcatcaaaatcacctgaggaacttaaaaaagtatagagattcttaaatcaaaactcacccttactaaagcaggggtatgaaaatctgtgttttttaaaaattttattttattttactttcagttctgggatacatatgcagaatgtgcaggtttgttacataggtatacatgtgccatggtggtttgctgtacctatcaacctttcatctaggttttaaggctcacatgcattaggtatttgtcctaatgctctcccttcccttggcccccaccccctgacaggccccggtgtgtgatgttcccctctctgtgtgtgatgttcccccccctgtgaccatgtgttctcattgttcatctcccacttatgagtgagaacatgcggtgtttggttttctgttcctatgttagtttgctgagaatgatggcttccagcgtcattcatgtccctgcaaatgacatgaactcattcctttttatggctgcatattattccatggtgcatatgtgccacaaccaacccaaatgcccatcagtgatagactagataaagaaaatgtggaaaatctgtatttttaaaagtttcaaggtgattctgagggctggaccaatttttgggaacgtgtgatctaggtaccctctcatttttcagttttgtaaacagacttagaggtgaactgacttaccactgcaaatttcttcagtggcagttaaatatactctgttaaatctctttcttttggatgggaatgttacaagctagctacaacaagaaggacaggactcttttaagtctgagggtgacatgaagtactaccctcattcctggccacctccttttttggccagcatggcaggtcctgaacctctccctaaatatgccactgtttgtgtcttaattgtatgttttgttcttaccttggtcacctttgaagttccccccagaccctcctaagaacgttggattcattgaggtaaataactgttgcaggtcttctaatcttttctcacctgaatctgaattcatctcagaacacccctgacacagcccactggcttctagagaagctgtctgttccatgcttggaatggaagtattgaaaaacttcatggctcatttcctttgtatcccagcctcaactctttgttgacctcattgggacttacagtttgttgatcctaccgcctcttcaccatccctcaaatccctcacctatttacttcctcagcttatattttatggccatcattaatttcacttccctgcatacatacgcgctcagcagcttggcccctttatctggctctgttgtgcttggcaaggccctgatcctggttaaatccagttctccacatctgcaactctgtagctaaacatggcaggagaaaaacacaactatactgactagcctcgcttgacattcatgaagccaatctcaagcttaggacttgcttcctagtctgtctattgcctctcttgcttccttatatcttctcctctttcctcaaacctctgacatcaccttctcacatgtagagtgagctttttaaaactgtgaaaatggaagcaaccagaagagaattccataaacttctataactcaaccatcatcatttgaacttcgtcttatatcttctgtctttcctcctattactctggaagaattttcccagttcttaagtccaaccatttcattcatgttctagatctcattccctctcacctctctgcaattgtcccctctttcttttatgaaatcctctgttccacattaccttctaactatcactctattttttcggttccactttacagtaaaattcttgtacagatgtgcctatatccactgtaattacctttcaattttttctcaaatccatgccattttgctttagccctcatccttgatagatatttttttggtcaaagtcactcatgacttccatgttgttaaatccaatgatctattttcagctctggtccttatttaactggttagcagcatcacacacagtgtatcctgacttcctccttgaaacacttagttagattttcaagaaactgccttctcctggtttcttttcttccttgctggcctacccttggtatctcatgcttgttcctgtctatatccctgacctgttttcatctctagctacactgcctccttggtggcctcatcctgtctcatggccctctttgaagcagggagtggtttcccaattcagggaggcggcatggactctggtggaaagaacatcacatgtcaagtcaggacattcatggatcttgttcctgaagaaagaaggaaaaataggcacaaccaaagagggccccaggctgctgaaaaggacccagggccacttgtcctctggggatagtctctgtcatctgagtccccactttttttttttttttttttttttgcgatggagtctcgctctgtcacccaggctggagtgcagaggcgtgatcttggctcactgcaacctctgcctcccaggttcaagcgattctcctgcctcagcctcccaagtaaactgggattacaggtgcacaccaccatgcctggctaatttttgtatttttgtagagatggggttttgccatgctggtcaggctggtctcaaactcctgacctcaagtcatcctcctccctcggcctctcaaattacaggcatgaaccactgtgcctggcctcagtccccatacttttgaggactccatatatacttctttaccatgtacatgctgacaactttcaaatttatgaatctaatccagaccactaccctatagtctagacccacatatccaactgctcatttgacatgtccacctggctggccaatagtcatctcagacttcacatgtctgaaattgaactcctgatctccactaatgtccaaacttgctttccatgtggaatttctcatctcagcaaatggcttcctcatccttgctcaagcctcaaactgtatcctactttgacttttcttttgctcctctaccccatatagaattccttagaaaatcccattgttttgatcttcaaaatacatctagaatccaactacttttcaccatcttcacttctgccaccctgattcaaccgactgccctctcttgcctcgacgattgcaatggcttccatactgatttccttgctgtagcaacttttttagaacatcagtcagatcacagcacccctctgctcagaagctcccatggtttctgtcatactcaagttgggttgcccaaaaacagacactgagatggagcttggagtatataatatttattaagatcaatgcgtgtgaagggaaagggaggaagcaggatgggcagaagaagaagttgaactctggcagctgttggtcaacccagaggaagctctggagcaagagttgcctgttagagtgtcctatgtcaggctgaaatggccttgcttaatcactggatgtggcctgtcctggaaggacacgaccttgggcaggtggctttctatagctgaggcagaccccaaaggagctgattgcaggaagaaagtccttcctcatagctggtccttcctataaggggaagctgcatggcacaactctgggtgtaccactgcttcccatctcatgaagagtcaaagtccaagtccttactatgatctacaagaccctaaccatttggccttcacatcacctccctgacctcatttccttctcctctccccatgcacagtgcaccaggcacagtgatatccttgttttccctgacatggtgagcacttttgggcctttgcacttgcccccctttttcctaaatgctcttgcctcagatggtgcatgacttacttcctttcctcctacaggtctttgctcataggtcaccctctcagtgtggccttctctgattctttcccgacctcttctttcctgatttactttctccattgcgcttaccaccatctgacataaggtatgtaacttagttagttgtttgtttatttccttacttattatcttcccttccctaagatgtaaatggcacaagggcagggattttcatctcttttatccattgctttccctagtgtccagaaaagggctaaataaatgaatatacattgaataaatgaatggacagatgtcaccatgggtgctaagaaggggcatcctcagctcatcaccattccctggtactaccagcccttaattcctcgaggcccctggaggcccagtcaaggtcctgatggagaaaaaggaaaattgctgtctctatcaaagcaagtggcttagcaacgctgtttctctcgatctgactccccccttttctccaccccagtgcctcccactcccgccctgctggtgattcccaatgcatttgagtagttgaatctgcatccttctttttaacttccatcccagatacttggttaccctgtgagaattcccctgtacatacagaatgggtcattctgctatttttaggacagatttgatacagtagcttttacaaaaagataagccaaagtttttagacttcgtgttagtggactgtcattctgtatttaaacagaacacaaaagaaagctgtctgagaccatgacacagtgaaaacagccttgatcaaacaaaaggccctctttgaagaggggagtggtttctccactcagggaggcagcatggattgtggtggaaagaacatcacatgtcaagtcaggacattcatgggtcttgttcctgatgaatgaaggaaaaatgggcacagacgaagagggcccctgactgctgaaaaggacccatggccacttgtctcctgggcatagtctccctcatctcagtccccattcttttgaggactccatacgtaacaaataggttggaggcaggagaatgatggaattccacacatagatgagtagagaagttgggaaataagccacaataaaagtgactaaattatttgagtgctttctataccaggcattggcctaagtgttttgtaggtattagtttacctacttatgtagtaacagtaaaaattttatggataaaggaccaagacaatgacaggtgaggtaatttgcccaaagcaattcagttactaagtggcagagccaacatttgaacccagaacccttatttgtatatgttgtcaccatggataatttggagcaagtggaagatagtcctctgtacgtaatcaaatgaagcctcatttaatttctcatattatgatcagatgacctcatttcagaggctggtaccattgcgacccaacttttggacatttttttgctactcttggcagttcattcattcattcattcattcaatatatgttgcagccttatcatgctctaggcgtgatgtaactaggtactgcagagtatagacagagaccttcaacataggccacatccaaaacaacttactattgaacagagtatatttccacttccttctagaagactagaagactgtactttttaggtacggattgatttctctctgctgggtttctcctatattactatttcattatctgggaacaccttttttttttttccctctataattatgtgtcttttaattcaaaggacccttacctaatcagagagttcaattttaaccttccgttagggacagcagtcatctataaattttcagaggttgttgttgtttactactaatgaaaaaaattattaagttctcttatttaaagtcactgaagaaaaaaatgaacaaccaagtgagagctgagtttctttacttcccggagaacactgctgttgtagagatggagaagacatttcctatgtgctggatgtgcttaaaggtctcttggtcccaaagtatctctcactacggccaaagatctctgctctgtcattactaaagtcagttcttcggagtaagacattctttcctcctgaaactcctattacaatgtggaaatgttcactcctgtagggtaaagtagttagttgagatagtaatgcacagtaaatgtttgtcagagcaaggttcagagagaaggagacacaaagctggtatgttttaatggggatgaaagagggaaagaaggtactagaggtgtgatatagtcttgaaaataagccaacttccttttctggggaataaagggttattatgcttgtgctttttcttagaatggctttatggggaatttcagctgtgatctattaggaaggcctcaaagatagaacttaaaagcttctagtatggctgtccttcctctagttagcaattgaaactgagttgttacaacaaaaggaaaagttgtcgttaaaagcaacacagttgcaagactccatcaaccattccttggggattcatcagtgcctggtaagtttgagaagagacccttggattttaatatacatggcagttataatttgtctagaccataatgattactattaatagggaatcctgtttttctatttttaaaaaaatttagagatgggggtctcactatgttgcccaggctggattcaaactcctaggctcaagtaaccctcctgcctcagcctcctgaatagctgggactaaggtgtgtgccactgtgcctagctctgtttttctttaaagttactgtgtaataaaaaaagaatttgcaaatgcataaaattgaatatacacatgtcccaagtcaattgtcaaatgattggtttttatgtaccaaaattctgcatttttttttcaaggtcacttctgatataagaatttacttcttccctaatatttggttcagtgaagtgttgaaagaatttgctaagtaatcattgaaagctaagattctagtgaaaaacaaaatgcatggtttaaaaattgaacatactaactgaaagacagtggaagttagatgcttcttgctgtaaataattaaacccaacagtgcagacgagagaacatggcaccaagagggacttgggctaagaaggatcatattgtattgaacactttcgtttccctgtaagggaaatcaaaagggtctttaatagttgttgctgattgtgaatatgtgcaacaaaatcccactgtaatccagatttatttttcaagcattttgctgtgattgaaggaaggagaaagggataggaagaggatggagttttattaaagctgtagttacttcttccctttaggaggtctaagtgtgacttgtcacagtgacctgggactttgattccctccagggccttcctgttctatgggcacattggtggatcaaagacaattgacttttgttttgttttgttttgttttgtttttggagagaagcagtggttctgctaactcagaacaagaacgacaagagtcatgtaggatgtttttctgagtttctctaacagtgctcgtttttttttttttttttgaccgccccctcttttccttttgaggtggggccaaggggtcaaacctccatttttctatctgtaaaaaagagaatcggcctttatgaagtgctttaattttaaaaattaacataggctaaaattgctgtgtgtgtgcacagttctgtaaatgttagtgcatgtatatatttgtgtagccacaacctcattcgggattagaacagttcaatcacccccactaactcccttgtgctactcctttgtggccacaccctcccaataaagtgtgttttaagttccttttttgaaaactgaccttcccagatgaatgtctctgttgccttttatttgttcatttttatttacgcagtgttccttgctcatttttgaagtaattcaaaatgacactcacggtaagcttgcaaggctgcctttcctttactataacggagaaaaaattctggaaagaaggcagctctttcagtatagtcatataagaacaaaatttccccaaacttggcttgtggctagattggaatccgtaaagaaaacacactcaagaaatctctcttgaagaggaggacagaggtttattttttatttaacgatttaccccttgacacctgggaaatgattagttgatgttttcaaagaagattaagtcagtgtggttaattaactgtggtaatcaggtgacttaaatcaattaactccttgttaacaatttccatcaattttgtaaataaatgactaaatcagtaaattgtactcttaagattaaaggctattttctgatttatttttttgatgacaaattagagtgtttccttctcatctcagtcactgcctgccactcttgctcttaatcataagccagttttagtttgagaggagcacaccagggaaacttttaatatatggttttaaggaaaagtcaggcttaaggacacctttgctccttcatctcagcacatttggaaagaatgatttagtgagagcagtagttgggggtgggtgtagaaagcaatcctgaaacacactctaggataagcttttattattaagtcacttaatgtcttgttttatttatgttttctaagttaaaactcgatgagggatataataaaatgaaacagggtttggctcttagctaaaaataaactttaatggatgtcttacatgctctatttagagggaatttcacaaaatattgggatatattgactgcattcatttgtaaagcttgattgcattaaaaataccatacaaatatacaactaaaatgttgttactttttagaatctttataattgaaaattctcttccctgcttacataactttattatgtctttgtctccaatgaaatatgagctggataaactaacacaagaacagaaaaccaaacatcacaggttctcactcataagtgggagttgaacaatgagaacacatggacacagggaggggagcatcacacactggggcctgctgggggttggggggctaggggagggatagcattaggagaaatacctagtgtagatgacgggttgatgggtgcagcaaaccaccatggcatgtgcatgcttatgtaacaaacctgcacgttctgcacatgtaccccagaacttaaagtataataataataaaaaaagaaagaaatatgagctggaaaattataaaaccatatcctatgcccctgaatatgccattgcattctctgaggattttcactgtaggacagatgatataggtttatttatggtttcttcaagaagggatatttggcatcttgaataacttttgaggagttagtaaatatttatgtatttgcaaaaattctatgctattctcacattttataaagagaaaatttctatggcttcctttaaggtattaaggatagattaaattgtgaaactgagctgaagccactgttgtaaatttaaatcactggctgccaagcaaaattctgggctcttcctattattatagaagctttctggccataccccaactaccccttcccaacttccctggacatagttaacctgtggccaaaccctttctggtactgggacatggtctggaatcacagctcagagatttagctcgactgctttccagatgtgtacctctgaagctctctgagcttcagtttcctggactatacaatgggtgttagtaatttctaccttataggtacctgggaatatttaaaggatattgtgaacatgcaaggtcctggcacttggtgagcattcagtaaacatttggccccacagggaacctgatattaaatcattcatagttgaccagctcttggttaggtcatgcagcaaagcagccaccatgctgtgattttttgaaataaagaaaccacttgtcaaattctctatccatagaaattgctggggaaaaatacagctttttaaagcagatgaaactactagacaaaaaaatgttggaagacaggcctggtcacctgcctttcttcccccaagaatgtttggttcttcacctcccaggtcttgaaggcacagatccaaatgtaaagttgccaagaagttcaaacgttggtggacctggtgtttccattttaggtgtcctgtgcatgctttctgtaacttggttttatgcagaacttgctgatgatgtctctgtaactctgagaacaggaatgatggaagcatgggtctgagtggaggtcagatgtgtcctctgggcaaggagaaggatttgcccagggaagactacacttgaagaggagcacttgattttgtgagaggttttagacagagcatgtaagaatcacagtcaatgaagagttttctctcttgcaaaagttccttattatttcatgaaactacagaaaggtcagtgagatgttcaataggtgagaaagctgtcaagctagacttggttaataattacagttaaaataatcactgatgtatttctttcacacacgtttattgcaagctttttttttatcaggaactgacatgcatagatgaataagacatgcaaataaacaattgtgctacagggtgagaggtctataatagaagtttgggagcacagaaaaggcagtgatgtagtcaactagacctgagaggaccaagggccaaggaagaccgcacagattgccatttgaactgagtcttgaaggagttgggagagtggactgtggaggattttgtatgtcaagctaagaagtttggtgcctttgaagaaatgtaagctgggaagtacaatgctcagattttcattttgtaaaaagaatacttgctgcaatgagagaaagcagatgaactagttaagttagaggattactgggattatctgggtgacagatgatgagggtagaactagacttgtgcacttggaagtgatgagaaaaggagagagtcaccatggaacaaagagaaagcttttatttgttgccgtttttgataattcttgttatttgttttataagttggcatgttttatttatgggaatattagacatgtcttttcaatgtatgtgtatgttaattacattcataaatattcaactttttttttttttttaattttcctgcctgaaaaatttccagcttgctgtctgtctgggcatagcgtgtgacattttctttgttttagttcactgattcctagttggttcatctccctcagggaacctttggaaacatatagtagcattttttgattgtcacaatgcctgagtatccctgccagcatttagagggcagaggacaggaatgctaaaccgttgcaatacacaggatagttccatactacaaagaattgtctgggcttaaatgccaatagttcttttgttgagggcccatcttggttgataggaagtgaatagagaggcagaaagggatgctattggtaataagagcggtcatacactgaaacttattatatgcctgatatatagtcaccatagctatagcatttgttcttgtgacactccagggaggtagataccattactattccctttttactaatgagtgaactgaggcagagtaggatatttggctctgggcctcacatacttaactctaatactctgtttttccacatgctttactttcttgtaactttaaattaataataagaggaaaaggagaaccacacttgctttgtgctttacagtttgttaaatatcagaatatacctcctggaaacatttctgccagtttagtagaatattgacaagttatcgcctccaagcatttttaaaaatatggaaaatatttgatgaaatttttttaaaattaggatgcctttgtagattggaagaaactcttatttgatggaaaaacagttggtgctccataaatgcctggggaattgaattgactctggaggcacttagtgtctttagagggtgtcaaagatcttgcaaatttattttaattttaattttaatttttttttacttcacataaaagagaatctgcctcacgtatgatctttgtaatttgaagacgtgccagtgacattgatgaagaatgtgactttttcttggacatgccttgcacttccctgtttctgtgccagttctagtttgtttcctctgtgaggcgtcccctcccctcagatccatctatctgtagcttaaatgcacctttctctacaggacctttcttgatatccactgaatgttatctgaacctctcttacagcatgtctcctcatgccatgagatacaatcatttgtgtatgtattttatctcttcctctagaagagtaccaccttttgggagaggcatagaacaggaccactgatgctaagagtatgcctagctcctctggtctcttgtgtctggcacagtgtcaggcataagcatgcactcaagaaatttttgtttaatagaaagtcaaaagaacagcatgtgttatagtaaagcaactccatcatggtggggaggtaataggcatgctctactctgggctcctgtcgcagagaggattttgtttggcttgaacaagacaaacatttaattctctcttacataaccagcagtggaaggctggtctggtggttccatgataccattagagacacaggctccacagtcctctgctggtgactcccattcctgaagtcacctcattgtccaaaatggctgctgtagccatagccatcctttctctatgccaggtagtgggattgcagaaggagaaaggaggacatgccttctctgtttaaaggagactttccagaagtcccacacaacactactgcttgcatttgatctcatcgattaagacttagtcctatgatcacatttggctgaagtttggaaaatgtagctttttagctcagcacatagttcacctgagtaacactgggttctattactgaggagagagaggcaaatgaatgttaaagtatgccatgactgctcctggccaaagctggtcgggtgacactgcacatcttctcttcagctttgaataccacattttgggagaggcatagaaaatttgaaccttatttgaaagagagaaacaagaatgatgagaaaactggaaacaatattatgggggaatgatggaaaaactggagatgtttcttttggacaagagaataggggaacaatggttagctctccaaatatttgaggaactattatatgaagaaggataaaacttactctaaatgactctaagagatgggaaagaaattgtagatatatcgtatgcaccaaaagaatgctggaatttgactttagggtcacttttaacctttgaccttatatagtacagatgcataccatatagatgtatccataagtttgtgcttttgaggttaaaatattgcttattctctggttacttcatattggaattctctttactgagggttgctatggtgataacacccttagcagtctgcattttgaaaagctttggacttttccttttgtgagatgtggtctctatgtttcccccatgcttggcgtttttcaaaatatcatcaagtcagaaacaatttccaaatttatcagagtgaagtgaggagaattttaaaattgtagatactaataacaggggttagtaattctatattgtacaactcagtgattcaataaatattgtcactatcaacttctttggattaagatagctatgtttaggcaactggttagtgttatttagttaagcatgtattttttaattattactaaatttcttaaacacccttgaaatataattgttgaaaatgtcttaaaaacacagctagtatcaaccagagaaataatttagcaaagagttaatttatttcactaagtagtgatatatttttgaacgcatgtggaatagatgtgtgcctataaacttgactttgtgaattaagttttatttttctagttcagttttactttgaatatggatatgttgttgttttgtgaatcttagacatcagaaagatttagttgggaagagaagtaataatgtaaaataaaagtaataataaaatactcaaatttctgtattaaattagcttttgggggaattagctacataattaggttattttaatagattttcaaactgggttgcagatgatgaatatagaagagctatatatatacataaactctcatataagcaaatatataagaagcaaaaaaaaaaccctgtagaattgagagggagacaatatttggagtttaaaggatcagaaaacactggcctaaaaatagtatcagtaatcaatttttattaaacacttactgatatgccagacccataatcctcactctaccctcatattaatgttatgagtaagagctcttattatctccgtttttagatgaggaaactgaggcacagaaattaaaatggctgtcagatagttagtaagaggtggagcagtggtttgaatccctagtatatgactagaaggacttcaccctggacagttacttggcttctaagcagtcttcgcgtgctcttccccttccttgcccttctgtaatattatagtagtttcccagtagtatgcagcatctggctattcagactttgtctcttaaccttctgtggaaaagctgttgacttttagacatgctgggcagaatggaagaaggaaaatacagactgttatacttggagaaataatgatttcatatgtaacagtagttgaatcaataggtggacaaatttattgaaacttcttgagttaatccagtgatggtaaacaaacacatggccaaatgagcactctataaagcatgccttctggaatgcatattgtcttgtcttgtctttttccttccttccttccttcctttcctccctccgtcttcctccttttttcttttcttttcttttctttctttctttctttctttctttctttctttctttctttctttctttccttctttctttccttctttctttctctgtctctcttacattctatctttctttctttcttccttccttttttctttctttctttctctttctttctttgtttttctttctcccttcccttcccttccctccttccttccttcttcctttcttttctttcttttctttctctctttctttctttcctctcctcccctactccctctcttcctccttccctacttccccccatttctttttctctttcttttgctctgggtttgctctgtcagtcaggctggagtgcagtgcagtggcatgatcatagctcactgtagcttcaaactcccgggcgcaagcgatcctcccacctcagcctcctgaatagctaggactacaggtgtgcaccatcacacctggttaatttgttttgtttttgtagatactggctctcactatgttgcccagggtggtctcaaactcctgggctcaagcgatcctcctgcctcagcctcccaaagtgttgggattataggcgtgagctaccttacctggcctcaagtctgtttcttgatcagtaagcctggtaatattgggctgtcttgtgtgcatatatgtagatgtacatgcatgcatacacatatattccactttgggtggaatggatgaatcttttgtttccagtggaaggagttctttgagttacaaatagtagaataagggctttcagtttaaacagaacccacatgagtgtttcattaatcatgttcacgtgttaatggattctcttgaggcctttggagtcattgtttttgcaatatttccttagggcctttttcttcagtccagattaatctaaaatacattgcactgatccagagatgtcaccaaattctcctgaaaagccctttgactgtatttgggctggcctgtgcttttatggaaaaatgctatctcactgctgatgaggtttctggcattagcaaagatggccttatacatggtaccacaacctatgtggtacgatgttaggagccctgataagatactctgttcccctacaatctgctccatcaagccagtgaggaaggtatgtaggcattaggaatgcctaaaatgccacaattagaaaattcattccttggagggcttctgttttctgctgaaagtgcaaacacccgtagaaggctttaagaatctctcaaaccttcccgtgaataagttcacctgggagcagatttttggggtcagggtcgtgagccatggaaactctggccatgtcatggggatctgagggagagagaaggagaggatttttagacagcggtgggggaagtcaggcggaggtgggaccatttaactagataaggctctaatcgtctcattcctggactatcagaacagccttttaagtttaagttgcttttccctctttgtaaccttacccaccaaactttgtgaagtgttgagtgcttatagtaaacagagtgaacataactcttcccagggaagaactggctgactttagtttcttggtttctggaaggagatgggatagttttattggcttgcttgaggatagccaaacggttgtggacaagagggcttgtttcctgacaagtgttattctgccttaagaatacaaagataaatggtctaccagagcttcagtacctgtttgttgcgttgcatttagtttggagtgtttgctctgtgcagtggagaatactttggagggtggtaaggtctctctgtttcattactggaaaagaataggagtggggtcatggcaatggggtatttcattcctctgtgcgtgtgtgtgtgtgtgtgtgtgtgtgtgtgatggagtcttgctctgtcacccaggctggggtgtagtagtccaatctcagctcactgcagcctctgcctcctggtttcaagtgattctcctgcctcagcctcctgagtagctgggattacaggtgcatgccaccgcgcctggctaatttttttgtattttcagtacagatggggtttcaccatgttgcccaggctggtgttgaactcctgacctccagtgatccaactgcctcagcctcccaaagtgctgggattacaggcatgagccactgcgcctggcctcattccttcgtttgcaggggctggatgtctaggtttatggaaatctattctcattcaaacagaaatagggtaacaacttaagataataaagtttttctttgaatgaattagaaaggcattattgtatgttattttagtcaaataatatttttgcatttattgcattcttctgttatataagagaaagtttagagaattaggatagtgaatacttttaatgcttgttttttttttttttttgagatgaagtctcacttagtcacccaggctggagtgcaatggcactatcttggctcactgcaacttctgcctcctgggttcaggagattctcccagctcagcctcccaagtagctgggactacaggtgcatgccaccatgcctggctaattttttgtatttttagtagggatggggttttgccatgctggccaggctggtcttgaactcctgacttcaagtgatccacccaccttggcctcccaaagtgctgggattacgggagtaatccaccacacctggcctttcatgcttttaggaaaaatttgaaattcttttaaacgtgggtcctggagaatcgctgaacttcctttttttttcttctattgagacagaatttctctctgctgtctatgctgattacagactcctgagcttaagagatcctcctgctatggcctcccaaagtgctggggttacaggcatgggctactgtgctggccaaactttttgaatggaaaactttttagcttggtttcagttgattaatcctcaatttctttatgtccttaattctatggcttatgccaaggcatgagttgaggtcaacagaaatccttttatgatgatagaaagataacgatgtccaagtttaatgtacagtataatgacttaaggtcaattctgggaaagcctgtatgtttatcatcaatttctttttggtgatggaattatacacctacagtatttcatgtaaaactccagaggatcacctgaaatatgaatgatttacaatggacaaaataataaaaatgctcatcgtaggaaaatacaaaaatatataaacaagaaaataaacataaaaatgcataaacaagaaaatagcaagttgggagcaagcttgcttttgactctagtttgacctgtgtttctcagaataaatcttgattttcactcttgcccttgaccgaagactgggccagtggaggcaaccaccaccatctgtgctttcagtgttgagcatcctaccaagcaaggtggcttagattttgaaagttttctctcagtcagatagtaggggaacaactcttagaatgttagaattagatgagtagtgggaatgccctggaaggaaccacccttcatggagggacggctgtgcttcaggcattgtgccagaggtttacagggacctctttaatcctcaccgtaacctgattttgcaggtcagaaattttgtaggtaagaaaactgcatactgtatcagtttaaattcaggttcatcaagctaaaccagttcagtaacaaatatttattgagtgaaggttcagtggtaaatgagacacaaacagttcctgccctcatggaacttagagtttggaatgacacagggacagtcagtgctttgccagagttgaaagccatgcatctcttggctttctggcgattgctttttccattggtattcttattttagccattcttactgaatttaatttaaattttacttaattattataatgcctatggatccatgttctgcatattagctcactcatactcatccaagactgtaactataggtacccaacacccagaattgagatggccactgaaaactctattcttgaccaacactctaatatcattttattttctttaattgcctttgtaagaagtataatacaaacaaaactccagtaagcaaatggctttaattatttgtgtgtcagttagtagagattttattgtatatattttctggtatagtttattactgaagccgtacttctttttagcattaaaattctaaaattttatatttataatagtgacaaaggtttttactgtaattactaatgatatttaaaacacagattaggcaaaatcttaggaaatataccctgctttttttccttccatttctggcaatcactgcagataaacttgtaattttattcatgttgctattaatatggggacattataaattcatcatgtctgtgcagaaacctgaacaccactttatcacacgtgggtatcagttggtgacaatgtaatattgttgattctgtgtcaacaagctattgaattgtttcaagtcatcacaatcacattataacgtgaagtgataacattgacagagcctgaaagtggtttggagacctcctcatgctatttgagcccaggcataacaaaccagggccaaaggactcctggtgcaaagataacctgctggtgaggcatgttctgaagttctttttgctcagtctgttaaaagcaatccagtaggggagacacaggaaatttaaggtcattctaccatgagagtatttgcaaatataataggtccttctttacagatttacaaggcaatgatttggcattacatttgtttctctatagggaaattaaaatcatgattatgctatattagcaaattgcttataaaacaaattacaatttttgattgtaggataagaagtactcttgtagccccctccctccctccctccctcccttccttccttccttcgttccttccttccttccttttcttccttccctccttccttccttgtagatctctttgtcatcttttggacatcatcttagtttcacacatatattctaacacatcatatatagttcgtttattgagggtaggctgggtactaggaggtcctgtaacaggccctgggaatacagaggtcgcttagtctcatctgttctgttccttatatttcacatatccaggtcgtggcaggagaattttgaactttctgcttataaaatcatttccaaggcataacttgtcactaaaggggaaaaatacaaaaatattgtgtaaaacatcagcaaaaccagtttttaaaaaagagaatgacatattacatttttattaaaaatgttgacttcagtttactagatgattaattatcagtacttactgcccaagaaaaggcttttaaacttattgttggaaatcttttggcactcttgctgcacaatatttcttaatagtttaagaaaattcttactctgttggcagaagccatacatgcccatcactaaatggtcaaggtcgaggcatgcctgtgtgtgcaactcagttattcatctaacgaatgaactgtgaataaagtttagtgtttgtgtgaataacaatgcaatgagcctcaccatcaccaagcataaacatttctgataagagttgtcatcagagttgcttattgatgttgaagcattggtttcgttagagtaaattatgtatatatatgtgtatgtgcatgtacgtatgtgtgtgtatatatatatgtatatacctgatctctactttctgaaaatttacacatttagaatgggaggttatttagttcctagcatgtaacttgtgacttataaacccacttagcaattacatactgcttcaatctgaatttgggccatagctaaataagggtgagttgccattttgtaccaaattgaggttaaggtgcaagatgccaggtgtcatttaaaccaaggctaggatgcaagatgctaggtctcatgaaatttagtgtctggacactgattgctaaccttgacatctctcctttctgccctctttttctctgtctccctttttctttttctccctatttttgcctcttctctctcttctcgtttctttagagcttgttgttactattgcgatagtcaagaactaaataatatggagttagggagaaggaatacagcaaggtgtttataagattcagtcaagaaggtccatttagtagttataaataatttagcctatgactatggggaattaccaaatctaccaattgagagtcaatttcttctcttcttgttgctattgtcataatttgcagtatccaactattgttcacttgataacctggtgatctcatctgattattaagatgaccaaaatgaaagtgatgtttatagctttaacatatccatgtcagtttgatttatggttcaacacttggacctaattaatcaggaaaaccctaatttgatgctgtctatcaatgctagtctgaaacaccattcaaaagccttaagcaagaaagctgcctttctaaagtctctcttgtcatttatttctcatgaatgtccattttcttttttagtgtttgattccactcaaccattttccagtaatttatattgctaatcaaaaagccgtataggaattctctgggtgactgggactggaaatgtgctctgaaatgggaatgatttgtagtttttgcacagggtgtgtcaaatcatgaggtgctgaagggcatgttattcttgtaagtagtttgattcattgggtccttatttacctgggcaggcaggccatcttaaattttcttctgtttggatagtgttcttttcaacatcctgtaagtgtagctcttttaccatgaaagatgtaaataaccagttagtctctagtggggattggggccagaggagaagaaagtcttgagcttagtttccttccacgtgtagggaaggttcctctccaggaacctcagtgacttagctgatagaggaggcactgcatgagctattcagggggagcacagaaaagactggtacaaatacactttcagtgctttgatgctggctaacaggaagttttcattgctcagcgttcttggtaaaaacttggacattcttttgaatgtttgagcgcttaagtgattgtcaatttatatttttaattttttgtgaatgtatgcagttgggatggggagaggacatttggagaaattatttttttgctctgataatgaatacggacgggaaaagtttgcaccacaacgcagaggtgcttatgactgtttttcatagccacaatcctttacattaatgatgaactacttgaggatttcagatgcttgtgtttttctagtgtggtcccctccccttgaaggggtagacctgtggacgtgtgatggaatggagcattccagggtgaaacaggccttcctggaaattagattctttatcactctcccaggggagttcatttcaagttgctggtactagcagctgcagcgtgagattgcccaatcctaggtgctcttattgatgggtgggaaggagtgggattgctgtttaagaaattttattatctttagaagggaagaatgtattatgttttttttttttagatgatctctttcatgtgggctaagataattttgagctctgactgtccaagctgcttagaggttctgagttgttctccactgggggtggtactgccactctcaagcggcatagatgtgcctgggagtgtttttgtcaccgtgatgtgggggagcactactggtgttccacaggtgggggtcagggatgatgtacatactgctttgaccaggacagttctgcaagatgagtaattgtcccaccccaaatggcgatagcgtcctctgaagaacctctgagaagtgtggctttgcttataatgttctgtagtgctgatggactgcctgattgtagaggtgagaggtgcataatgaaaaaacaagtgggatgtaagagccttgggggagaaagacaggtgactagtgtttaaatggaaatggagaagggtagctcagttataaatggctcagtttaaatctctcattgctcagaattgagaggctgctcaagtagtacatctcattctgctgccatttggttattggaaaggcactttattttaattactaagcaaatatttaagtaatctttgagatcaactatcttgagagctgactggattctgtggcctggatactcagaaacatccagcttggagaggatggtgggggctggtcactaggatgttgttggcaatgccctaaggcagcggtccccaagctttttggcaccagggactggtttcgtggaagacaatttttccatggacagcagggtggtggtgggggagggatggtttcgggatgacactgtttcacctcagattatcaggcattagattctcataaggaatgcacaacctagatccctctcatgtgcagtttacaacagggtttgtgctcctatgggaatctaatgcagccactcatctgacaggaggcggagctcaggcactaatgctcactcacccgcctctcacctgctgctgtgtagcctggttcctagcaggccacggaccagtaccagtttgtagcccagggactggggacccctccctcatggaacctgttcgtagtttgccatgcaagcggacctgctttggatgcttctggggcagctggaggggctgcaaggtgagacccttctctgctagcagcctcttgcctgcacctaccagcctgctcactgggctcagggttggggtgaggttctggggattgaagtggagctccaagctcttttcatggtcaaagtctgtatgctagttcaggctttacctactcagagtgatcttcacttttaatgcagttattgtctgagtaatcaccctcatactcatttgacaggcactctttggcttggcactgaaagctctttttctccatcttctcagccttgttgcctaccactctccaagaggtcatcactgcttgggtcatacttattagaccctcacccatgctaagcttctgtcaagtttttgttcttttttttcttagagacaggtttcaccatgttggccaggctggtcttgaactcctggcctcaagtgatctgcctggcatggcctcccaaagtgctgggattacaggcgtgagtgatcacgcctggcctgtcaagttgttttgaccctacacacaaagcctggtctccctcttcaccttcccaaatcctgctcattcacaaagacccagtgtagtcttataattctttgtgaagacttctctgatgacaccggcctgtagtgttatttttttcgccaaagtcagttagtttttattatctccattgcttatttggaaccaaattgtctgttgtcagaggcatagctttggaatcagactgcctcagtgtaaatctgtgctccactacctactagctgtgagatttgttcaagccttgtcgtcctcatctatgaaatggggccattgataccatctcacaaagctgttgtgaggatatgtaaggtaatgcatgggaagcacttaaaatattgctggcaagttctgggtgaacaaatgctgtcatttgctttgcaggacatgaaatgatgaaataagtacaggctctggagtcacacaggtcctggggctaaatcagacttcgacattttctacctttgtggcccttgggggagttggttaatgtcactgaggctcaggttccccttctattaaataagtataaatctcacatcatacagttctgagaggatccagtggatatgtataaagctttatatattgtataacacatagtaggtactcagtaaacaatatcagctgttgttattgcatggatatttaatttataacatataaatcacttttgcccccaataaacttataggctctgtcaaaaaaggaccatatctttttatttatttatttatttatttctttttttttctttttttttttttttttttttttatcccggcccgttctcaatgagctgttgggtacacctcccagacgaggtggtggctgggcagaggggctcctcacttcctagtaggggtggccgggcagaggcgcccctcacctcccggacggggcgtctggccgggcggggggctgacccccccacctccctcccggacggggcggctggccgggcggggcgctgacccccccacctccctcccggacggggcggctggccgggcggggcgctgacccccccacctccctcccggacggggcggctggcccggcagaggggctcctcacttcccagtaggggcggctgggcagaggcgcccctcacctcctggacagggcggctggctgggcggggggctgaccccacctccctcccggacggggcggctggccgggcagggggctgacccccccccacctccctcccggacgtggggctaacccccccacctccctcccggacggggcggctggccgggcggggggctgacgcccccacctccctcctggacggggcggctggccgggcggggggctgacccccccacctcccttcccggacggggcggctggctgggcagaggggctcctcacttcccagtaggggcggccgggcagaggcgcccctcacctcccagacggggcggctggccgggcggggggctgacccccccacctccctcccggacggggcggctggccgggcggggtgctgatccccccacctccctcccggatgggtcggctggccgggagggggctgagccccccacctccctcccggacggggtggctggcccggcagaggggctcctcacttcccagtaggggcagctgggcagaggcgcccctcacctcccggatggggcggctggccgggcggggggctgaccccacctccctcccggacggggcggctggccgggcggggggctgacccccccacctccctcccagacggggcggctggccgggcggggtgctgatccccccacctccctcccggacggggtggctggcccggcagaggggctcctcacttcccagtaggggcggctgggcagaggcgcccctcacctcccggatggggcggctggccgggcggggggctgaccccacctccctcccagacggggcggctggccgggcggggggctgacccccccacctccctcccggacgtggggctgacccccccacctccctcccggatggggcggctggccaggcggggggctgacccccccacctccctcctggacggggcggctggccgggcggggggctgacccccccacctccctcccggatggggcggctggccgggcggggggctgacccccccacctccctcccggactgggcggctgccgggcggagacgctcctcacttcccagacggggtggctgccgggcggaggggctcctcacttctcagatggggcggatgctgggtggagggtctcctcacttctcagacggggcggctgggcagagacgctcctcacctcccagacggggtcgccgccgggcagaggcactcctcacatcccagacggggcggcggggcagaggcgctccccacatctcagacgatgggcggccgggcagagacgctcctcacttcccagatgggatggctgccgggaagaggcgctcctcacttcctagatgggatggcggccgggcagagacgctcctcactttccagactgggcagccaggcagaggggctcctcacgtcccagacgatgggcggccaggcagagacgctcctcacttcccagacggggtggtggccgggcagaggctgcaatctcggcactttgggaggccaaggcaggcggctgggagatggaggttgtagcgagctgagatcacgccactgtactccagcctgggcaccattgagcactgagtgaaccagactccgtctgcaatcccggcacctcgggaggccaaggctggcggatcactcgcggttaggagctggagaccagcccggccaacacagtgaaaccccgtctccaccaaaaaagtacgaaaaccagtcaggcgtggtggcgcgcgcctgcaatcgcaggcactcggcaggctgaggcaggagaatcaggcagggaggttgcagtgagccgagatggcagcagtacagtccagcttcggctcggcatcagagggagaccgtggaaagagagggagagggagaccgagagggagaggggagaggggagaggggagaggggagaggggagagggggagggagagggagagggagagggagagggagagggagaggcagagcaaaaaaggaccatatcttatttttcttttttcttccactgatcctaggacaattgcatatagtagttatgaatttatttgtggctttagtgaatctggcatcatattcttttggtccttatttatttattcatttatttttgcacttaaatgatgtgtctacatgataatgcatcaatttgcattgtgggttttgtccccaaatctttgacttcttgaaatgtccttatagtattgttttgctctaagaaaacatcagggctctgaatcaataattgggacaaagcagtctattcagtggtttgtaaactggattaaaaaaaaaacccaaaagaattcctgccacctatttgatgatctgtaaggaaaaccagacagttaaaatgttgcacagaaagagactagcaggttggtttgctgttcctgtcttgtttcagtttcattaactgaatccttgactattctatcaatttgacactagacagggtagagtgctccatacaatttgttacccttggctatcatcactatagtgtaaagttttggaaataagcaggtgactctaaatcttcaaaaggggactggccttgtttatgtgggcaaggtatgggaattgtagtgaactgtcagccaacttatgaatatcagaaggatgtctatccataccaaaggaatcaaaattaagtatagaaaaagtgaagcaaaaattatggataagttaaggaattgcctcttaaatttgtttgtttctttgagttcagtgaaggtggaactattaaaatgtgatttactcatacaaatttttaaaaagaggactgtacctcctcaggtagaccaagtgtttggaaggaccagcatgtgttaagaggatctagcggggaaataggatttgccacagaaattaccttactctgttaactttggacaatgttccattgactaccacttgtctttgtcttataagaatagaatttatggaaggagaaagaaacttacaaggaacgggtaaaagaatgaaactgctattaatatgactcaatgtttttttctttctttttttttttttttgaaaaaaacttctagatattccccttttttcagattattccagattccatttttctttctatggatttaagatggtaaatttctatttaaagtctcattgtttgctctgatagctttctatatctctgatatataatggtctcagcaggctgagttttacaaagagaattctacacttcctgacgaacatgcattagctattccataagcacccggtgctgtgccagaggctgtaaatgacacagaggaatgctctcaatccagtgttgttccttgctgtggaaaacaaacaggcaaatgactcctcttctctgggcgctatctgttactctaatatcttatcttaacacattcttagtccaacacttacccaggaagcttgggatatggctacttatgaagaaaggattactctttttttttttttttcccctagctttgggctctttatgaggttggaaaacaagtttattcctatgtctaataaaattttactaccgatttcaaaacgcttaaattttttttgcattgctttcaattgctgcaatttttcctaagcccaataattttttaatgctatgttagtcaccaagtaaactactctttttctccaactgaagtatataagcactatggattctatgccagcccaataatgaactcaattaatgttaattgagagcagctttgggggaaaaaaatcagatttttacattcattcttgagtttagtggaataaacttttttttttggtgaaagggaacatagagtagtggtcaagtagcacgaatgctggaatcagagctgtcagattcaaatccttgctttgcacatatttgctgttggatcttgggcaagttaccgaattgctctgtgcttcaatttatttatttgtaaaatattcataataacagtatctatttcatagggttattatgaggattaaatgagctaatgttggcagagcacttagaatggtgtgtgccatttaagtgctatatgagtacttcttttcatctttgcaccatctattctgattgatgggacagacaggggctagtgctggagagatagggtgttcatttggttccgatggttcctttgtgatgattgcctggttcttaacaaaaggtttttatttcaatgtggattgtattttcctcctttcctccttggtttttactagagggatttttttttttttttaatcaggcagcccccaaaccagagaggctcctggagaatgttttaaagttacataaatgattatttgcaagattacttcttggctaaaactggattggttgaatgtggcagttttgagactattttctgaacaaagttttaaagctggttctatgtagattttttttttctccctgtgggtggctccaatgtatgaaatcatccccttagctttttttttttttaaatcttcaaataaataacaaaatgtagataatatctagataaaacttttggagggcttgtgagtaaaggctacttatttaaaacaaaacactcaaaataaattgcatatagactaattgaagtaaggggcacctgcaattgttattagacctaatctagaccttttcactagtggtttatttttggtttatttttaaacaacacatattccctttatgagagaatgagcttctgaggccagtgaagcattttggctgatggctgagaggtcacccagcaatgataaagtatcagtttgttttttctggagagatatttccaaacaatagtcgtttgggagttataaacaggcatcgaagttactactgaaaaggtgaatttgacaaatgaattatagatctgttgataaattgagtaaattggatttgatatattagataatggagtgaggagatcaagtgtgaaaatcactacctataaaaattagttaattgcaacatttccccatcagtttcatttttcatatgtgtgattttaaataattgactttgaagtgttttataaaatgacttttgagtctctattttgtgttcttttcatgatgtgtttaacttggtattttagtttggcaaaaacaaacaaatccccccaccccactcctcaaaaatgggacttgtaataaaagttgcttaagaaatagcattaattatatatattttcaaaacaggcaatatatattgttctgataatttcctcctaaatactcagtctctaaatttatatttttcttttctccatagcaatatgaaactgtctgtaagaggactgttctttatgattgttataatttttcaaccagaagatactacctttacaacctcagatactaagggagacaaatgtactgaacttacaaatgtattatgttggattactaacaatagacctaattgataaaagtgatttaatatatgttgtgttaatagctaaacctccaaagcccctaatctcccatggaaatattgctttgtagaacaaaatccaatgagaagttctgggattccagagtgaatttgtacattccttaggggcatttttgcaagggaggttgttgtgttttaaaggtagttgataagagacctgcaccaccaaccccagacctgcaccaccaaccaccatcatgcattagtctatagaaggtatttgggtgtacgtactcctgtaccactcggtaccaccatttagccaagcgaagtttctgaccatttgcagcatacattataaatcaggatgtcactaccagacaatcagatttgaacattccatgaacaaagtagcctatataccctagaaatagatcacttaactatgtttatgtcatgctgttgatatgcctgcatttacacaaatcaggatagcacattgcttatttattttaggagtaggtacttgatctgtatatttacctaattttggttaattagccaaaaattgaaatgggtaatttagcatgattgcttaaatacatggggaagatataattattcttccaactgcaaaaatttctcctttatcccttgggtttgtgaaagaataaaataattttgagtcttctctaagtggggctggtagtggctgctttctttgaaaaatttttctatgtggcacataatgcttgggaaggtcactggccaggtatttggggaactttgtcccttggggagacctaggaaaatcacaggatatattagttcagtgaagtgagcttgtttaagttatattgtccttccagtatcactagggactatcactgccacttggggtgtcaacttttggtgtcaagtttgtatactcttgttggctgcagagattttgttttgttttgtttttggctctttggtttaaaaaaaattgtttgcagagatgagcttatagatctggcaagttataatttaatttttaaaaattaagacaaaatattagtctgaatctaagaatgaaaggccataacttgctatatatgatttagtaataaaaaatcacttaaaaaataaggtgaggaactcaagaaagtatagtcaagcaaatgaaaagttactcacgatgttatcaatcagagataaccactgttaacattctggtcttttttacgctttttttttttttgcatatgtaactctgttatcagtaaaaatttacgtccttgtttttgttacattaaattataagtatttctctaagtacttagaatttctccataaccattttttaagttactaatatgtcaatataaagatgtaaacaaatttaatccttttattgttggacatttaggaggtttgcaacttcctttgttataaataatgttgcgatgaaaatctttatacataaatctttgtctacttctttgattagttccttaggaaaaaaatccttgaagtaaaagtactaaattaaagatcaagtatttttaaaaagcaagatacgtgttgtcaaactgctttcccaatgagttccatcaagatacacactaatcaactgtgtatgaaaatcactttcttcccacggatgttcaaataaatatttttatattatcattgggagaatgtttacctaattttctaatttgcatttctttgattatctaattagttgaataatttttcattttatcaaaaatttatatttcttcggttaaatatctgcatggcataagtttttaaaatttctgtctattattgcagaatgtgacagtgcgcattttcgctgtggaagtgggcattgcatccctgcagactggaggtgtgatgggaccaaagactgttcagatgacgcggatgaaattggctgcggtaagtgaggaggggccaggctaagttctattttgagtaacctaagtgcttcctggtgatttcagctgtaacaaagagaagagctatgccttttagtgacagagccaggtctgggcccaagtcttttgagatctgtgtggttgaatagagaactgatggcattaacaataatttcactcccttctgaggtaggggttcaattcacattgatgatagagcatcagtttctatctcacccttatcccttgaccacaactttgatatggaaacatatttgggtgcagttttctggagtctgtaggtgattatttctaatattcactctgtaaattttgtgtacccacaagaacaaacaaaaaataatgttatctgaactactgtgatttgtaagtcaaagaggagtccatttttatgtaaaggatgtagaataacttgtgtcaattaccataaagaaatcacagaattggttagtgtgatttatgttttttaaaaattctagttttaaaaaatttgaaaaatacgataatgtagtaaacttcaaatctaattaattataaaatgactttcacattcattttgtcatttagttttctcactaatcttctgaggtcggtttcagattagtaaattgagactcggagaagttaagtcatttattaaagttcttacagttggtaagtctatgcacagatcccattgctcttcccaacttcccataggtgatcaatcatacatctgcaatttccttcatcccagcaggtgaactaatgagggttatctttcaaaaatcaggaaagcaggtgaaaaatttttgttttgaattgttggccatgttatggcataccatagcagtcaaactttggtgtgtcatttagatgacaacgcatttgaaaatgggaggaagggtaaggatggggttctgtacagtgctcctcaaatactcatgcacaaatggatcacccaggagctcattaaagtgcaaatttagattccatattttgaggtgggacctcagcttctgcgtttctataaacttcctgatgatgttgatgctgctagtttgtggactgcactttgaacaagggactaaactatatttgtagagacacaatcatgtgctaactatttgcctcctctgggcttactgagttcattttgattaaacaataaaagcaaaaaggcaagggcagtgtatctggggtaaaggaataagtgaacagctatgccaacaactcttcagagattgttacctgtattatattttattgacctgtaaaaataataacaataacaacaatatcaatgacgatagtgatagcaagtaacattacatggcgctttcacatacattatttaacttatttttcacaacaaacagtgagatgagtatagtccccattttatgatgcatacattgaggttcagagaacctgccaaagatcttaaaggaagtaaatcatggaaataataattatttgattttgggttttctttcccaaatctcatgaattttccagttcatcatgatactttactattagttattatgaaacaaatagtttaacagtaactcacagttaatgtttacttgaatgaagcttttaatctaatacctttatcataatttttttgtgtgtatgtgtgctgtttgttttattctctgtgtttttaagttgctttggttcatgagtttgttgtgatgctgttgctgagcttatttgacagtgaactctgactggcgtccacagactctagtataagggttgtttactatttgccttcaaataaattgagcaggagtttacatgatacactcttctggaacaagcattgcttgctagtataatggggaggatgattgccataatgagtcctcttttggtttgttttagctgttgtgacctgccagcagggctatttcaagtgccagagtgagggacaatgcatccccaactcctgggtgtgtgaccaagatcaagactgtgatgatggctcagatgaacgtcaagattgctgtaagtgtttggagaggaatcttgctttggctttgtggacacctaaaacccaacctgtcgcaaagaagttacacacaatgggatgattctttataaatgtggagcagggccttaaatcataagggaacctatgccagcaatctcattcaggggttggatgatattgaaagtacggatgtactgaagaattatgaatataccccagcaatttggaagtgagataggttcccaatctttaattttgattatgttatgctcaagaaaggaaccaaatatttattggagtgtatagctgggtgtcttcatgtgtgtggttgacagctgaatgagtcctttggctctgtggcatactttgtattcaaaccttccactccttctgccccaatattaaattctcttctttttgactgagtggaagtaggtaggtttgttggagggcttcttggtggttacttcagtgactgctgccacagccaccatagggagagcttgaacaagaaagaaaatagtagcgatgaagcggatcttggcaactgcggcatccctggacattgagggggtttggttcagtaacctggaaaaaacctttaaattctaatttctttggaatcagactggaaaagactgttttaataggtctaacaataattttattttatttatttttattttattattatttttagagtcagggtctcactctctcacccaggctggagtgcagtggtgcgatcacagctcactgcagcctcaaacaccggggctcaggtaatcctcctgcttaagcctcctgagtagctgggactataggtgtgcaccaccatgcccagctaatttttaaattttttgtagagacacgatcttgttacgtttcccaggctggtctggaatcctgggctaaagtgatcctcctgccttggcctcccaaaatgttgggattataggcatgacccccccatgactggcctgaaaataattttagatgagaagtaatgttgggtaaatataagatggcgacctatgagcaatttgtctatcacatgtatcattccattcctttctctattaaggatatttgtataatttaaaatcattcttgtatcattgtggatgtttttggctgcaaggaaagaaaacacaactcaaaaaagttaaacaaaaaggggatttattatctcacataataagaagcctaactatagggttgttccagggttgattaattcccagctcagaaatattatccagctttttctcacttttttgctctgccatatttatcctattggcctttcttgattgcataaaagctgctcaagtctcaaaatttgcatcctgaaggcctgacattctctcaggcagagaggaggttcttaatagatagatactaaatgcataaatgatgggttgttcatctttaggctatatagttttgagtctattttctcttactcctctcacagagtgggaagaaagctgagctttattttgcgattcaatgtgtggtggatgaccctttgctaataataatactttacagaggggattggaactactaagggcaactgcttgggaaaagagactggagataagtttatagcagtcattttaaaacaatattgcatatcattttaaatgactatacatttcatgaggcaattctcccatttttaatgatataaaaattctccattagatatcttttaaccacaaacaaaatatgccacctctgtattcactaaagttaccagataactcctgattgccaatgggcacttttccttccttctcacactggatgggcatttagattgcacttgactctggagaccattcctccttcttgacaccactcccttggctgccatgactcccagcagtcctggctctcttttgagctgctttggtcattccattttattttcctcttctactcagcccttgagtattggtgttgctcagagccctgccctgagcagcttttctcattctggacactctcaggatagtctcaccattctcatgactttagtgaccctctgtggcctgatgagacttaaatctgtgtttacaacccagatttttgcccacacttgagtcttgtatactcaactacctttggacctctgcaagttgccttgaactcaaggtgtcccaactgaaaataatcatcttccctcctgaactggattttccttctatatttgctagtctacatattttatctttattaatagaaatagcatttaacccactatgaggcactggcagaaaatacaaaatcagtcttaaactattggaaataggcagatggaggctctcttacttgttgaatttgtgaaacatatttcataatgaaagtattttattagatgaagaagaaagattgctgtaagtgacaggaaagatataatcaattaacatgaaaaggctatcacaatcccctaggcacccacgctagaaacttggaggttattcttgattccttcctctttttcactgcccacattgaatcaccaactcctgcctaatttgcctcataaatatttctaaagttaatctcttcatttctctctcttttatttttattttttggcaaggacagattttttttttttttgagacagggtcttgctctgttgcccaggctggaatgcagtggtgcaatcatggctcactgtagccttgacctcctgggctcaaatggtcctcccacttctcagcctccagagtagctgggactacgggcgcatggcaccatacctggctaattttgtattttttttttttttttttttttttgtagagatggggttttcccatgttgcccaggctggtctccaactcctggcctgaagtgatccacccaccttggccccccaagtgctgggatgataggtgtgagccaccatgtctgacccatctctttatttctgctcccactgccaacatctctcatttgggtgtcagcagtagtctctgggttggcctccctgcctccagttctgtggatccttagattctctctgacactgatgctgatctaactaagattctttggtagctctccattaattccaggagaaagttccaattccctaacacggtttacagtggcttccaagatgtgactagtgcttattttcctatgtctatcatttgctattcttgccttgaagtggccacttgggcacagcagtgcttttagttcctgtgggtgtgccatgctgtgtcctagccttttgtctccgtgcaagctggctgaatgctgaatgctcggttctagacagtccttctttgcttttggcctacctgactgctgcttctttaagacccagggaggtgtcactttttcaaggaaactgtccccatccatgctcccatcccagagtgaattaagttcctggattgatggttctatcattcctgtgtgcctataatccactttcataattgttttctaattactccttagtgtcccctagaagactatgagcttcttgagggtagggattgtgccttattcatttgcagatccccatattgctatactgtgtggtacattataggccctcaacagatgtttgtgtaattaatgaatagatgaatctcagcattagataggttgatggaattatataattttaatttgtttgctctctacatttgaatgagcttttaattgcttcttcgtaagccctttgaaaacctaagcacaacatttagaattatttgggcttgacgtaaagaagaaagccaaggtaattgaacgagcactgatacctgacccaggttcttttcatattttgtttgagacaacccatgacttgccttctcgggaataaaagaaagttctttaattttatgtgaaaattggcaatatatacttaaataaattatttggaaatttaatgaggaagtattaatctctttaacctttttcagataaaattgtgtctctgccatgggcagaattcagacacttaagtgccttctggaaaaatctatctattctgcctttattaatagaagtaaaattggacccacaggtataaggtacttagagaaaatatgaaattatttagtgttagaagtaggctgacttgaaaaattttgtttgctgttccagaattataagacaccattttgctaattaaacagaaagaaggaacaaaatgacaaggaagatataatcaattaagcatggagaagggtgttaattatggttttataattattatatcttatcacatgataatttctatatgtttgaattttcaagtaccaccttgaaaactgtcactgtctacttatcttttacatatttttttttttttagagacaggggtcttgctttgctgcccaggctggagtgcagtggcatgattatagctcactctaactacataaaaagagaagttttttttggctcaagtgatcctcctacctcagccttccaaatagctacgactacagctacttggaagtgagccactgtgcccagctaaatttattttttttttcttttaagatataaggatctcactatgttgcccaggctagtcttgaattcttggcctcaagtgatcttcttgcctcaatctcccatagctgggattaaaggcacgagccactgtgccaggtttacttgtcgtttgaaaaggtttttcatgttaagttttgggggtacattccttaacagatctaattttatcagaaaaccaagttttgctgaacctaaatatctatactacatataagtaaaagaagctctgtaggctgggagcctcggatccctgacagttttgcagaacgctgatatctatggactctaaaatagacttcatttatagatacccacggaccactaatggacaaaaacatgaatcaatatgtattgtggcattcaaatcctagcgctttgggagaggagggaggttccaagatggccgaataggaacagctccagtctacagctcccagcgtgagcaacatagaagacgggtgatttctgcatttccaactgagctttgaagagagtagtggatctcccagcacagagtttgagatctgagaatggacagactacctcaagtgggtccctgacccccgagtagcctaactgggagacacctcccagtaggggccgactgacaccggatacggccaggtgcccctctgagacgaagcttccagaggaacgatcaggaagtaacatttgctgttctgcaatatttgcagttctgcagactccactgatgatacccaggcaaacagggtctggagtggacctccagcaaactccaacagacctgcagctgagggtcctgatggttagaaggaaaactaacaaacagaaagggcatctacaccaagaccccatctgtacatcaccatcatcaaagaccaaaggtagataaaatcacaaagatggggagaaaccagagcagaaaagctgaaaattctaaaaatcagagcacctcttctccttcaaaggaacgcagctcctcaccagcaacagaacaaagctggatggagagtgactttgagagttgagagaagaaggcttcagacgatcggtaataacaaacttccccaagctaaagggggatgttcaaacccatcgcaaagaagctaaaaatcttgaaaaaagattagatgaatggctaactagaataaccagcatagagaagaccttaaatgacctgatggagctgaaaaccatggcatgagaactacgtgatgcatgcacaagcgtcaatagccgtttcgatcaactggaataaagggtatcagtgattgaagatcaaatgaatgaaatgaagtgagaagagcagtttagagaaaaaagagtaaaaagaaatgaacaaagcctccaagaaatatgggactatgtgaaacgaccaaatctacgtctgattgttgtacctgaaagtgacggggagaatggaaccaagttggaaaacactctgcaggatattatccgggagaacttccccaacctagcaaggcaggccaacactcaaattcaggaaatacagagaatgccacaaagacatacctcgagaagagcaactccaagacacgtaattgtcagattcaccaaagtttaaatgaaggaaaaaatgttaagggcagccagagagaaaggtcgggttacccacaaagggaagcccatcagactaacagctgatctctcggcagaaactccacaagccagaagagagggggggccaatattcaacattcttaaagaaaagaattttcaacccagaatttcatatccagccaaactaagcttcataagtgaaggacaaataaaatcctttacagacaagcaaatgctgagagattttgtcaccaccaggcctaccttacaagaaatcctgaaggaagcactaaacatggaaaggaacaactggtaccagccactgcaaaaacatgccaaattctaaagaccatcaaggctaggaagaaactgcatcaactaacgagcaaaataaccagctaacatcataatgacaggatcaaattcacacataacaatattaaccttaaatgtaaatgggctaaatgctccaattaaaagacacagactggcaaattggataaagagtcaagacccatcagtgtgctgtattcaggaaacccatctcacgtgcagagacacacataggctcaaaataaagggatggaggaagatctaccaagcaaatggaaaacacaaaaaaaggcaggggttgcaatcctagtctctgataaaacagactttaaaccaacaaagatcagaagagacaaagaaggccattacgtaatggtaaagggatccagtcaacaagaagagctaactatcctaaatatatatgcacccaatacaggagcacccagattcataaagcaagtccttagagacctacaaagacacttagactcccacacaataataatgggagactttaacaccccactgtcaacattagacagatccacgagacagaaagttaacaaagatttccaggaattgaactcagctctgcaccaagcagacctaatagacatctacagaactctccaccccaaatcaacagaatatacattcctctcagcaccacattgcacttatttcaatattgaccacatagttggaagtaaagcactccccatcaaatgtaaaaggacagaaattataacaaactgtctctcagaccacagtgcaatcaaactaaaactcaggattaagaaactcactcaaaaccgctcaactacatggaaactgaacaacctgctcctgaatgactactgggtacataaagaaatgaaggcagaaataaagatgttctttgaaaccaatgagaacaaagacacaacataccagaatctctgggacacacttaaagcgtgtgtagagggaaatttatagcactaaatgcccacaagagaaagcaggaaagatctaaaattgacaccctaacatcacaattaaaagaactagagaagccagagcaaacacattcaaaagctagcagaaggcaagaaataactaagatcagagcagaactgaaggagatggagacacaaaaaacccttcaaaaaatcaatgaatccaggagctggttttttgaaaagatcaacaaaattgatagaccactaggaagactaataacgaaaaaagagagaagaatcaaatagacacaataaaaaatgataaaggggatatcaccaccaatccctcagaaatacaaactaccatcagagaatactataaaaacctctatgcaaatcaactagaaaatctagaagaaatggataaattccttgacacatacgccctcccaagactaaaccaggaagaagttgaatccctgaatagtccaataacaggctctgaaattgaggcaataattaagaggctaccaaccaaaagaagtccaggaccagactgattcacagccgaattctaccagaggtacaaggaggagctggtaccattccttctgaaacttttccaatcaaaagaaaaagagggaatcctccctaattcattttatgaggccagcatcatcctgataccaaagcctggcagagacacaacaaaaaaagagaattttagaccaatagccctgatgaacatcgatgcaaaaatcttcagtgaaatactggcaaacccaatccagcagcacatcaaaaagtttatccaccatgatcaagttggtttcatccctgggatgcaaggctggttcaacatacgcaaatcaataagcgtaatccatcatataaacagaaccaaagacaaaaaccacatgattatctcaatagacgcagaaaaggcctttgacaaaattcaacagcccttcatgctaaaaactctcaataaattaggtatcaatgggacgtatctcaaaataataagagctatttatgacaaacccacagccaatatcatcctgaatgggcaaaaactgggagcattccctttgaaaactgtcaccactcttattcaacatagtgttggaagttctggccagggcaatcaggcaggagaaagaaataaagggtatccaattaggaaaagaggaagtcaaattgtccccgtttgcagatgacatgattgtatatttagaaaaccccatcgtctcagcccaaaatctccttaagctgataagcaacttcagcaaagtctcaggatacaaaatcaatgtgcaaaaatcacaagcattcctatataccaataacagacaaacagagagccaaatcatgagtgaattcccattcacaattgcttcaaagagaataaaatacctaggaatccaacttacaagggatgtgaaggacctcttcaaggagaactacaaaccattctcagtgaaataaaagaggacacaaacaaatgaaggaacattctatgcttatggataggaagaatcaatatcatggaaatggccatactgcccaaggtaatttatagattcaatgccatccccatcaagctaccaatgactttcttcacagaattggaaaaaactactttaaagttcatatggaaccaaaaaagagcccacattgccaagacaatcctaagccaaaagaacaaagctggaggcatcatgctacctgacttcaaactatactacaaggctacagtaaccaaaacagcatggtactggtaccaaaacacagatatagaccaatggaacagaatagagccctcagaaataataccacacatctacaaccatctgatctttgacaaacctgacaaaaacaagaaacgggaaaaggattccctatttaatacatggtgttgggaaaactggctagccatatgtagaaagctgaaactggatcccttccttacaccttatacaaaaattaattcaagatggattaaagacttaaatgtcagacctaaaaccataaaaaccctagaagaaaacctaggcaataccattcaggacatagacatgggcaaggacttcatgtctaaaacaccaaaagcaatggtaacaaaagccaaaattgataaatgggatctcattaaactaaagagtttctgcacagcaatagaaactaccatcagagtgaacaggcaacctatagaatgggagaaaatttttgcaatctacccatctgacaaagggctgatatccagaatctacaaagaacttaaacaaatgtacaagaaaaaaacaaacaaccccatcaaaaagtgggcaaaggacatgaacagacacttctcaaaagaagacatttatgcagccaacagacacatgaaaaaatgctgatcatcactgagcatcagagaaatgcaaatcaaaaccacaatgagatatcatctcacaccagttagaatggtgatcattaaaaagtcaagaaacaacaggtgctggagaggatgtggagaaataggaacacttttacactgttggtgggactgtaaactagttcaaccattgtggaagacagtgtggcgattcctcaaggatctagaactagaaataccatttgacccagccatcccattactgagtatatacccaaaggattataaatcatgctgctataaagacacatgcacacatatgttttttgtggcactattcacaatagcaaagacttgggaccaacccaaaagtccatcaatgatacactggattaagaaaatgtggcacatatacaccatggaatactatgcagccgtaaaaaaggatgagttcctgtcctttgtagggacatggatgaagctggaaacgatcattctgagcaaactatcgcaaggacagaaaaccaaacaccgcatgttctcactcataggtgggaattgaacaatgagagcacctggacacaggatggggaacatcacaaactgggtcctgtcgtggggtaggggagaggggaaggataacattaggagatacacctaacgtaaatgactagttaatgggggcagcacaccaacatggcagatgtatacatatgtaacaaacctgcacgctgtgcacatgtaccccagaacttaaagtaaaataataataataaaaaaggaattataaaaaaaagaagttttgtaaaaattgagagcaaatcttttttcttccattaggggattatattatattttttagatgatcacgttttcccccaaagctctttgtatgtagacaatttaaaatcccaggataagataatgttaccatgttatggtaattcctgcctcagatttacaggatagctttcacatcatgcttgcgggcatcagttcactggattttatctgttttatccggaggcaaatttcatgaactgctgatgccctgctttcacctatactaatcaacatgggatgaaatcaagctagcttaaatttttttctctttataaaattgatacatggtcaatgtaggcagtttatagaatagaggaaactatatagaaaaaaataaaatcactcatattcatattcacaccactctggaataactgctattaaagctttggtatatttccttcttgtttatacaaggatttcaatgggtgggttgggggtccttggttaatacctatacttgcaaaatttttatttcattaaactttttaccatatagttttaaaatctatattgtattctttacacatgttgataacgtaattgtgtacatagcatgcttgagtgtggacactattctctgggcattttgataacattatacttctgtttttgctttgtaagctcagcttggtggtagccaggtactttaccttgtgtccctatgaactttatgctttccaatatccttgttaatgacaatagattagtctgtgtctagcaataattataaattaagtaataattttttctcttcgcagcacaaagtacatgctcaagtcatcagataacatgctccaatggtcagtgtatcccaagtgaatacaggtgcgaccacgtcagagactgccccgatggagctgatgagaatgactgccgtgagtctgttttagtccttgcactgtatttggtttcacccttgtccctttggcattttaatcaatttgttagatttgttgatggacataaatgcctacaatatgcctcttgttattgcaatctcttggcagattcttttgtggattaggggtgatgttctgataagagtctatttttaacaagacattctaagagtgtcctgccttagtgcatcaagtttctgtattttttatagtaagaaacttttaacatgaacatagattctgaaaggaaggataattaaatacattgagtacagaatcaagtttggtaaattttaactgttattacacagctatagtaagtttctaggtcaaatttctcactagttttcctgcttttatgaactcaacatttttcagattacctttggaaaagtgttacattttgaaaatgtcttttcctataacagcagcatactatatctctttgtaactgatcaccacaaaataagacatataaatcatagtattctatgtataatgtataaatattaccacaccaaaataagaaagtgcaatcatggttcattatctagtaacaggtaagtaaagaacaatcttcctctttcgaggcttatatagaagtgttaggatatgagaagataggaattagtctgctgtgtcagtcctatagtccatataattgtctttaatctcaggcataccacagtttctctctctttctgttttttattttttatttttgagaaggagtttcactcttgttgcccaggctgagtgtgatggcatgctctcggctcaccgcaacctccacctcccaggttcaagcgattctcctgcctcagcctcccgagtagctgggattacaggcatgcgccaccacgcccgactaatttttgtatttttagtagagatggcatttcaccatgttggtcaggctggtgttgaacttctgacctcaggtgatccacccgcctcggcctcccaaagtgctgggattacaggcatgagccactgtgtctggcccctagtttctctgaaaagttcttacaagtctagcgtttatgaatttttccagaagttccttgagtttttaatatatatatattttaatatatacatataacatatatttctgacaggccttttcgtgcagtcctgcatttcataaatttactatgtgctgtataaagatatagtcatgtgtcatttaatgagggggacacattctgagaaatgtattattaggcaattttgttgttgtgtgaacgtgatagagtgttgttaaacaaacctggatggtatagcctactgcacacctagggtaaacagtatataccctaggcatatactgttgctcctaggctacaaacctgaacaccatgttcccgtgctaaatactacaggcaattggaacacaatgttaagtatttatgtagctaaacatatgtaaacatagaaaaggtacagcaaaaatatggtattataatcttaggggaccactgtagtacatgtagtccatgcggtctgtcgttgaccgaaagagccatatgcggttcctgactgtacttccttttgtttgctcttaaatttatatttcaaacttcaagaaattatcccagtattccattaattggtgagcagatttttgtgtaccttagaaatcttgatcataaacttttcagttattatgtctccaacggaagattcaagttttagcctattctcacgggatatctcctctattgttttataattttgatttaattttagttctctggattgtctctaaattccttcctttgatacaaatggtttattttatgctttctgataaaagaactatcttgtgtaaattttgctaaacttcccaatatggtgctgtgactagggtaggagctaacatacattgattatggcaagcaaattgtttctagtcactgtacatttcaaactatactgttcatggaagatatacttgtatatgtgcaaaagcaagacctatgcttccatccataccatgaccacatggtgcatttttaaaaacgacccttctccagtgctttctcccttgcatgttatttttctttgggagaaatgtctgtgctatttgccattgtctctccatttcctagcagagttcctagtacagttctgttctaattttcatctgaaatattcttatttatctatttatttttaattttactttaagttctgggatacatgtgtgacgttcccctctctgtatccatgtgttctcatcgttcaactcccacttatgagtgagaacatgtggcgtttggttttctattcctgtgttagtttgctgagaatgatggcttccagcttcatccatgtccttgtaaaagacatgaacttgttcctttttagggctgcgtagtattccatggtgcatatatgctacattttctttatccagtctatcattgataggcatttgggttggttccaagtctttgctattataaatagtgctacaataaacatacatgtgcatatgtctttattttttgaaagacattacagtgtttccactttggatttaccttcactctggaaattatgcaaagaatttagactaaactctggcaagtttagagatggtagcgtgtgtctggatgccacagaatagcaagtttaggggtcaaagattctcctttcagtgctttgtaaagcacacagtaggttcttcatttaggcaaatgaagaagatatttttgattaataataatgataaaccatatgttatattttgtagcattttataaatttcagagcattatataaattctagttgttactattaggttcctttatgaggacaatagggcaggcactattataatctcttatgaataaacaaaaacttcaaagagaagcgtgacttgtttgaggttgtatagtagagatagggcttaatttgtcttctagttccaagtctggtgattgctcttcatggagggctttatttacagaaggagaaagtcctatcttgtacaagttaagagaccaccagaggcctgtaccaccagccaaaagtctgtgtctttatcccttatttacaagtagatgaaaatgagtgctttattgcaaatgcagtgggactaaaggaactgctactttggggaaaataaaagtcagctgaaacagaatgtttgcagccaagactaaagtcactaatacaaccggctcacaactttgccaatgaaccttctggcaaaaacctggcaggatacgaatatgtaagtagctgctgtaaaagggaacgaagcagaggaaatgagctttgtaagttattatatctgggcaggaatttttaatcaagtttttttttatttaaaaaaatttaagtacaaatagttggtgaaataatgattcactaaggaaagaaaaccaaatttggcttactgtttctggaatcatacaagtcatgaacccttcagggcacactgtgacctaaaatgaatcacatgcatgtaagggattttgcagtgaggcattctttcctatttccctctaccttgtttatttatagctaagtttcatttatggagcagtgtaaaaaaaaaaacctcagaaatcagaggaaatgtagaaaagaaacttcttattcttttgttagtgctttgatctggtcacagtcagatatatacaagaaggaaatgaatggcctcgatcaaagtccttagaaaatgctagtataggggatgggttgcaggagtgatcccattttgttttccttctttgtttaaagctcttgtggaaagtgggaaagggaactgccagtcaccgagcaccagccaccaccttacccacttttcacgtcaatgctgcaaggtgggtatgaggaccagctctgttttacagagattgtaaagattatcaagatgtaagagtaggggagccaggattttaacctaggtctaaaccatatgcctgtgctcttaaaagattttgctttaggaatagaaacgtataacttatttttgtttaaaggttacttagctattttattatttttacatattattgtctaaaccttttttagtatggaaggttttttttaacatatacaaaagaagcatgaagtgtatagtgaacccctttgtatgcatcactcaattacatcaatgatgaactcataactaatattgttttatttattctctttattctccccattattttgaagtatttcttagacattgtataattccacctgtaaatatttcagtatttatctctaaaatataaggactgaaacataatcataatatcattatcacacctaaaaattaaacaactcttctttaaaataatcagatattgagtcagtttttaaaattccccaatcatcttgttattttttatagtttgattatttaaatcaaagtccaaataaaatctttatgttcaagttagttgatatgtctcataagcctttcaatttatggggtttccttctatttctgttctttaccccttgcaatttacttgttaaaaaaaaaaacccaggtcacttgtcctggagtttcccacagtctggcttgtgttcattgtgtcccctgatgtcctttaacacattctctgtcctctgtatttcttggcaattagtagctagacctggagcagggtttctcgaccttcacactaatgacatttgggaccggacagttctttcttgtgcattgtagaatgtctaacagtatccctggcctctatccactagatgtctgtagcattgcccagtcgtgacaatccaaaatgtctctggacgttgtcaaatgtcctccaggagccaaatcatccagttgagaaccactgatttaggggactgaacaggtgcaaggattttcttggtggggaaacaagggaaggcaagagtactttttatataaatctgtgtattttcattaggagacacaggatagctagctgtctgtgatgtgagtagccattgatgatcattgctgaaatccatttagtcatagcagtacttagttattttaaatgttgcattagatatataacagctgttattagttgctttaaattagaatgttttcatgtgatcaaagattaaatgaggcttagccagaaatcatcttcatgagacatgacactttattatttctgcagtgacgatgcatggaaatcattacttgtggacaaacttagaattagcctgtgaatggggcttttgtttttctatttctcagaaatagaatggcctataggaatgaatatattaggtacctggaaaccacctaaaaatagtaatggatgttggaaaagctccaaagaagggctcaattcttccctctaatattcaaaaggattagggagcttgatgttgtagtttgtagccctgcctgtcattccagacccctaggttgtagttcataccctttcaagcttctaaaatcaagacactgagctccaagacagagtaccttgtgtccattccgggcattcctttacagaacaaagagtggtgtgtaagagtcctctcagggaggcaggcagggagagaggaggtgagagaatgttcgagatggtgaggaaggggaggatattagggtctcaacaaaaagattatttttgagataaatgtggtatagtatgagagattcttattgcgtttggtctttttatctgcttcatctttatatgcataaggtattggtggttattttacccttttagaaaaatttttgaatatatatatattaaaacctgtgaaacaggtaaaagctcattttcccccttagttcttttattattcaatctggtcatctgtaaaatggcatctcatattaaacagcttgtcaattaacttttttttttttttaaggaacagagagattcaaaactgcggtccattttacttctaatgggattagcatcaaggaaaaaccactcatgcagggtctaagataaacatcagaacaatgcagcaattataggtcattcaattaatatattgacgtgactttcagttgctcaaaaatagtacagtttttttctgttaagtgaaaagattattttgctttttcaagcaccatattagaatgattttggtgtgaataaaactattgctaattatcgttggtttgcagcacttctcttttgttacttaggaatgccaaagaaagggtaaaatccctgttacaatgaaggctttcttgctggtaatcagcagtacttggtctgcctgcaactggggctgctttgtcccagaagttttatttctattgactttctgctctttagaatttaaacatttttctttatatctttaactgctgaaactccagctgagggaacagtgggaggggaataaaaagatggttaaagtcattttgtggactgtgagggtgcatgaagaacatgttcttcaaactcagttccacatttaagctgcccagcgagccttgcccttgctattctctctctccctgaagccagaaagaagaagcaggcgactctccaaaggaccccatcttacctgtcacatcacagatgtacctttttagcattctcacaattgagataggattcagagccctgaaacctggaggaaggaaagaaaactctcttttatttagtttccatcatacaaggatgttataaatatcccccatctttaaaaagatcctaagatccctcttagctgttgccaattactctgctcccttttacaacagagtttcctagcattaacgttaatggctgtttccgtttaccctcgtcctgtttctttctttaaaaaaattttttttacatatgtgatatatccaactgattgtcctttttttagaacccactgaaaatagtccttcatcttcaccaatctcctgaaaatattctttcaatgctaccaatgactgccattatgctaagcctaatggttcttgttcaaatatcacttctcagagagctactccccacagttactctttaccttttacccagctctatttttgcaagttttttttcccattgtgacatttactttaatagctgtaatttcactctcccaaatagaatgtctgttccatgagaaatgggattttatttcattctttagtaccttgcacactataggtgtgcaataattatttttgtatggattgattaataaaatgctgtgggaattgctacttcacttgtaattttgtttaccttttaatttaattcttagcacagtatctatgaagtcagatttcaataaatacatgttgagcacaagagaattctaattaagaagaaggcagcactctgtagaataactggtttctaggatattgacattcatccagcaatgatttgctgatgagtattcaaattatttggggctacatttccagcagggaggctgagccacaccatttctagtgattggaaagtggctactcttataatgctggggtgcagctagttttcctgtctctttgattagattttgtcttttgttctgcccaggtgggtccctgggaataactactaaagtatgaaaccatggtgttgtctggctttcaatgaaaacatgtagccccgtgccactaaacatgatgtacattataaacatttgtttaccccttagaaggcatcttacttctttgtactattccttggagcatttgatgcacatttttccatcttgttgctcggtcacttttgtaatagagcttgtgtgagttttttttttttttaaggaatttagaactatgtcagtttttatctcctttgcagtttttggtgatagctctgttatgggaagaaggcagtgctgtggatctggactccttggagcaaccctctcaggcacatttctagttgaggtctaagattaggtcactgtggatagagaccagcaaggaatctcaggcttaagacccagttagtacaaagggagtgagctaaggaaaactagataacttagtttatttctctttttcctttggcttcctgaaagccacccagactaaacttgatgttagttcaattctacaagtcctcgggatgaccatattttctttctctttccaaggtgctgaatttctttctttctttctttttctttctttctttttttctttctttctttctttctttctttctttctttctttctttctttctttctttctttctttctttctttccttctttctttctttccttctttctttcttctttctgaatttcttttttaataaatctggttttatataactttttattgaaagcttcttcaaattacttttggactggggaaggatatgcttctctgtttttttccttgtatattactgcattccctaagagctagtccatgatggcagtcactttagggacttgaaattcaccaggaatgggggtttggggagtcgtggtggtaccttcatgagactaactttatggcctgttttttggtattgactctcctgtttgtcctggtactccttctggaaagttatttttcctgtgtaggtttcctagaattcctagattatatcatattgaagtactttgttaactatgccataagttgtgggaaactagagttggcctcacttttcccttcttcctaatgtggatgggaaactgactggcagaaagaaaatcttccccccttcctcttgggtttcttctttttcttttcataatctcttttaagaattttctattaccatttcattcaatttctttcttctttaatttttcgcttcttcctgttacttactctgcagcctataagtggtagatgtatctgtggtagtggttagtaacctgggttatggagccaggttgattggatttgaattctggctctccaactttaccagttatgtgacctttttcaaattccttaacctcttaatgctcaggttcttactctataaaatgggagtcatcatagtatttacttcatgaagttgttatgaagatgaaatgagtttatacatattgagtactttgacacatgtctggcacatagtttttaatacatgttattgatgatgatgatgatgatgatgatgatgatgatgatgattgcttgtttaactttgtgggtagcgcttgaagtaagtgctggtggccaaactggtagattctttctggcaaatcattacattgactggattaatctgtcttggagccagaggaaataacataaagtaacttataaaggatgactctaggaccttgaaaagtcccaggtgtctgggctggacttgtatcggtaatttcttgtgtgtgtgtgtgtgtgtgtgtttcccaatcttggcttaagtttcctaacctacttttaagattccttcttcataataatggttttttctatgttgtcctcagccatgttgtcaaattgtgagaataaaacatgtctgcagtcttcctgtcaagataataatgaacagtgccttatatttgtatcttactctgcttaaaatgatttccattctaagaggtctacaagatcttcaaactacatttctacaccctcctccctgattatgtaaacagaactatagcatagaaatttcttgcttcaaaccaaatcattaacagtgaaaaaatataaaaactcttgtctgcataattttggggcagctcccaattatgggggaacaaatctgaacatgtatcatttgggattgggagaaagtaaagaaaggggaagcaaggagtggtatgaggaaggatattctcacctttttgtgttagaaaaaaccttaaaggtctgaggcttaatttatagctacttgttgatctttccattaaaaccaaattcagaaggaagagtttccttggtgttcttatatatggtctcctctcatattgcactttaccctatacttaaattcttgcaggacattatagccacatgatggatttgctctgtgggaagaaggttagacttaggcttgccaagcaaatgaaccaaaaaataagactttagatatctcccagttggaagctcaaaggattgtgaattattgttttctggagtagattgaaactcattaacatctttagcaatggtagtagaatccattcatttctttctttgctcagtgttgacagtttggacctgttgtctctgtgtgggtctccaaagagggaaaaccattcagaaacagattttcaggtattttcagtatttggtggagttagggagctctgtgcaatctttcctatgagtatacatcccaggttaactatgcaccgaagagatcaaggtgtgcaggggttgagaggggtcctctgctgattgagagtgattctttatcagtgtggatggagacaagaaagctgtgtgttcctcattccaaaagtcaaactgctgacctctggccatcacaataccctccctgatgatatcaagctgggcttcttgtttgttgggtggggaatgggccttgtcagtaaacttgtagtcatgtcagtggttacagttttaatctttcccctttcaattttctggcactggctctcaaaaagcaggatgaagaaaacgagagatccatccagcacacttattccagattctttatatttataattatcaccttaaatgaagtagccaccgttcaagcccagattaattttcctccagacagatagcttatctattgcaaagagctgggttttctacgagtttttcttctgcttgctgctgctcttaaaaggctagataacacattgactctaggagctatctggctcacaggggcaaaggaattgcttgctgacctcacctggtcttttgcatctcttgaagggagaattaataaacatcacttgaagggagagttgtgtgactcatttgaaggcacatttgtaaggcatatcatctcagcgaggaaagacgcaataactctaggcactggctcacttttggactattaaaaaacaaaataaaattcagaaaaaattttaaattttaaccagctatttaaaaatgccttccattttaacatatgattgactatatgtaactctggcaattgagatatttaaggacacttaataaactagctttgaacctctggagatgagaagagttaggcttattcctttactataccaaaaaaaagatcattggagagtccatttttttaaaaagtgcaagttgttaacatggcacaagtttagtacagtttcagcacagaattttgtgcatggcttctgcttgaaaagacttgggactatccaaagaattatcttcaatatatttatatctctataaaatctcaaattgggttcttaagtgcaaaattgagactcaaagtcaattaagacataccttttccttggttaaaaagaaatcagaagatgacctgataatcactacaaaaataatctttcatgaagaagatggtcagaccaaggaagatatccacatttgtgaaaaggagggtattcaaaggccataaaaggcagaacttcaaaatattttaaaaagccgaatgaactaaaatgttcacctgtgataaataatagcaacattgaacatttctcaagcacagagagtaatgtcccacccctgtactaagtgtgcacagtgagaaatgtcccacccctgtactaattgttggggattctaaaatgagtaagacaggatccttgatctcagggagtttcattatgtcatggcggaaagagatcaaccatccacagaataaagcctccagtaagaagtcatgagagacaggtggtccaagtctggcaagtagagaggagggacagatagcacgttattcctgtaagggacttcctgattttcaactgtgacctagaaaaccaggtccagtgagtagcagtgaggtggtcatatgtacataacgtggcaacaacaatttgtgctttgaaagcacattatgcttttcaacatgctttaccagacatggtcttttcaggccgctctaccctgtgcagtaggttatccaaatgtgcagatagggaagtagcaacatggagaggacatgaagcttgagtcacagtaaatagctgcttagtggtacctctgggccgccagggctcctgaactctaggcctgctttctttctgcaacccgccagtggaagaaatggcctttcttttttccaagcttgtgcagtggtactttagtttcctgggatgttatctgtatcatgtaaaagaatgtttgattttgaactaaagttaaattctttctcattcttcatcttttggctcaaaagtcacttcttcaggggatacttttctgggcccccaaatctctctgctatgcagtctcacagtcctctgtactttccacattagcacttatcccagtttgtaatttaccatttgtgtcttatttgattaatgtctgtctcccatgtccagccttactctccatgaagccagggagcatacttcttttgtgtatcaatatatgcatttagtgacttgcatatagtaatcactcaataaatgtttgctgaaggaaatttaaggtttgtttactgtttccttttcctttttttttttttttttttttttacaatagagtacccaacatgtgagcagcttacttgtgacaatggggcctgctataacaccagtcagaagtgtgattggaaagttgattgcagggactcctcagatgaaatcaactgcagtaagtattgtgcacaagatgtgcagttgtgtgctgaagctggtttatactggtttgagagagccaatatgtacatctcttcccaagttcaggttcagtgaattcatgttggtagtttgaagtcagccgttggtaggagtatttacacactggaaatcggcaaacactacaaaccagggcctttttgttcctggataactggttcttaaacagttaccagcacaccactgcttaataagaatccctttttaaactggagatgctcttcctttgagattaaatggctacaatggagttaacttctctcttttctttcccttcttaactttctgttgcagctgagatatgcttgcacaatgagttttcatgtggcaatggagagtgtatccctcgtgcttatgtctgtgaccatgacaatgattgccaagacggcagtgacgaacatgcttgcagtacggtgatttctttatgctgggtcatgttgttgggagtgttttgttttgtttcggttttgttttgttttatccccccgctcccccaccaatgtacctcttttttcaaggagaagagtcactacgtttgatggcagatggaatcagacggtcactagggggtcttggcacaagcctttgtggtgttgctcgacctgggctcctttattttccaaggatctgtgtagatgtaaagggctggtgatggacagtttgccttctttccttaggctccaggggtacaggatatattgtatcactggattctcaaatgacccatacctctgacaaccttgatagtagaatgagagaagtgtttttaagggaaaggaagttcctaggagtggctctaactctcctctttactttgaaatttctgctgcattaaagttggagggtcaggaaagtttctttttcttcgttttctttttttggagatggagttttgctttgttgcctgggctggagtacagtggcgcgatctcggcttactgccacttccgcctcctgggttcaagcagttctcctgcttcagcctcccgaatagctgggatcacaggcatgcaccaccatgtctggctaattttgtgtttttagtagagatggggtttcaccgtgttggccaggctggtctcgaactcctgatctcaagtgatccgcccgcctcggcctcccaaagtgctggtattatgggtatgagccaccacgcccagcctgaaagtttcagtgtggtataggtggctttcttgcctccacttcttcacgctgaccttgcttttatgtccatgctgttgcctgcaatgcaaatgacctctcttattgttgccacctctccacttatgttttttggaaagagtaaagttagaagactctgtgaaagagttttactatgttcagtaagttggcagctttgcgtggtgatttatttactagaatgtatgatttccctccacacctcttttgattggttggtacccatgccttagggtgttgttaaatattttcgatatcaccctaattttcaatgagccatgcctgacttcctttctggaacctgggcttatttcagtgacagagaattaaagagaatgtgacatcatggaatggtcgactcagaatcatttggtcatagattagcaattacggagcttgtagtaaagtatgagaacgttggatgttgtcatgtctgcagcatctttgtctgcattttctgttctgtgccaacgcattgcaaaccatcttgtttttaattttttttttttttttttttttttttgagacagggtctcactctgtcacccaggctggagtgcagtggtgcgatcttggctcactgcaactccacacacccccaccaggctcatgccatcctcccacctcagcctcctgagtagctgagactacagacatgtaccaccatgcttggctatttatttttatttttcgtatttttggtagagatgaggtctcaccatgttgcccaggctgatctaatttttaatcttgaaaaacagaaaccggcacctgagttcatttcctggacccaaagctgctgttatcttcttctttctctctcttttttttcctcctttttaaaaatttttgtcaagatgtctaagggattaaattgatatagaaatttcaatttctaggagtactgcttaggcagtgaggtgagagcactttcagtttttcccggtgatttgtgtctttggagtgcagctgttgctttattccagactatccgacctgcggtggttaccagttcacttgccccagtggccgatgcatttatcaaaactgggtttgtgatggagaagatgactgtaaagataatggagatgaagatggatgtggtaaggaggggaagagattcctactgaaaagcattttcttcaagtgttttccagcgcttgttttttctcctttcctttttagaaattttgtgtgacaagcaagcctcaggattggctggagttgaaggggttgtttaggaacttagtgggtggggaagacggaggtgactgcgctaacttctcctaagaagattcagaacacaaatacagattaaattataatcctctcccttctatctttaaggcaaaataggtaggacagtctctgtctcttctataccccagtctgactttctccctgtaagactgcctgttttaaatagatttaaaactatataaaactaataggctggggaaggaaagaaaatagggaaaatgtcatttgtcttagaccttacaatctttaaaaatgactttgaaccttggtaacagttcagcttatttttttgttttggttttgtaaattctgattcccaaatgagtcactgacactcagtggtgaaagagaggccaccttgggaacacgtgggttggagctggggatggtaagtgtaggagaagctactatccagggaagtgcttaaagattccgtgagaaggaaattgccagtgatattcacccttttatgttgctgatattgacccttttatgttgctgatatcatcagcagtacctccaacaatttagcagttactaatacccataccctacagcaagttacctgcaccattccaatcccaggtatgataagggaaatgcttgttaaaactatgttttatgtttttatgttccagaaagtggtttttctacatttgggttatggtttttcttatactgttgacatttcactaaataaacaaagcaaatcaaaaagcccaaccacaaattcaagtaattctggacctaacttgatggccctaattctataattcatgatttaaataactacatcttttcttaggggatcatgaatttagtttgtcgataattgaggcccatatctgcttcttcctcttataaccctactgggggctgccttttccaggaaaagtggagtaattccattatgcctctccttagaatctcagtaaaagactagtggtagagttagaaatcactaacttattgtaaaatgtagatcatttatagatttctcttgttcaacttgctctacatcctctgtaaaccactgattaacaaagagctggctgtacctcccctatggcctgtaactctctctttttccccccacagaaagcggtcctcatgatgttcataaatgttccccaagagaatggtcttgcccagagtcgggacgatgcatctccatttataaagtttgtgatgggattttagattgcccaggaagagaagatgaaaacaacactagtaccggaaaatactgtagtgagtatagacatttacctgggtagctttcagataaagatatttctgttttctagaacagacgttcaaatacagtgtatctgttggcatttgcataacaaagcaccccaagacttagtggcataaactgagaaacgtgtcttatttctcacagttctgtgggttggctaggtagttcctctggcctgtatcagctcactcacacgtcaggatgttgcagtaaaagcttgggctagcctagccttgttgacccagaggctgaaagagcaaatcctagggctcaagtactttcaaggttctacttatgccaagtttgctcaagtcttattgtccaaagcaagacacttggccaaacccagagtggatggaagaaatagactccatctattgatgggaagagcctaacaattttttagcaactccccgttcctaatccctaacgcacacacagggaggattgtttcaatggcaattttgatgaccttaaagatgttctggagattttattacctggcttatacttatggaaaaaggccttgtctggctgtactaaaaaaaaaaaaaaaaaaaaaaaaaaaaagcttctggttcctgggttatgtaccttgagttactctccaatggcaaaactgagttggccatgcacagtgttgttcgattatgtcttgtgtgaccacattcatttatgaggaaactgactggaactagggattttttttctccttttttggggctgtagaatattcaccccaccaacaacccatcaactctgtggacagctgatggtcctgtaaggaaatgccatttaaaaccttgatttcatcaataatatactctaactaaatttgtgattgcctagaagtgcccatgtaactgcaaccccaaggttattttttgtttcctgacaaaaattgtacataatatttaaacaggcagagacctctatggcatttttttctctatttcatttgggagcccatttaaaaaagcttaaaaattaataagagatatgtagtcacagtatgaaagttggaaaataaaaattaaccaaaagaaaaaaatataatcacctgaaatcccatctcttgaagccagccacagttaatatttctagggcttattcttgctccagtcacttgggagttcttagccctttttactatgtagacacaaagatagacccatgcatgacctgatttttttttcataaataagacttttaatgacttatacttgcacatagttataactttaaaaaggagctttttcttttcttttgtttccactcaaggcagcctcttgttctgtcacccaggctagagtgcagtggtgcagtcatagctcactgcagcctccatcttttgggctcaagtgatcctcctgccttggcctcccaaagtgctgagattacagttgtgagccactgtgcctggctaatgcttttatttttaattttttgtgaatatgaggtgtagctacattacccaggctggtcttgatctcctggcttcaagcaatcttcctgtctcagttgaacttttattgcaaagttttgcagtaagctttgaagggtgacagatttttctgtacatctacttcatgcttactgagctgctactcatggaaaaagaagctattagattaatcagtcttgtccagaggtcaccattcatttaacaaagttcttttcttcgtttaggtatgactctgtgctctgccttgaactgccagtaccagtgccatgagacgccgtatggaggagcgtgtttttgtcccccaggttatatcatcaaccacaatgacagccgtacctgtgttggtaagtgatggggggcggcggctacttgtctttcattacagtacactgatgggtgccctgatctctgacatctaggaggttgcacttgtggagagtcgtcatggtctgtcataacaaagagcaacccagacctcacagaaaacctggcaaatagggaattttaactctgagaaggtttggtgtggtgtacaaggcaaaagaatggttctgtcatgagcgagttgactagctacctggaacctatccattacttgatgagggcggtagtccttttctgttttcttttcaagtatttggcatcaggattggtgcagccatactggttattgaatactgaactacttccatgaggttggtagatagctgctgcctgagcccagcaagcaccgctaccttgctcccctggcctcttctccaggatgcacaagcatccccaggatcccacaactaaagagttgttacctgacacagcagaggatcaccaggtcattgctcaggtgactacactggtgggccagtgcctttgctgggctggctactcattccactgattgtgacatccacttggaactatcattcaagatgagcagattctttatcatggtgcttccagatggtggctggcattaaactagacaccagtacaccaactatttcctcatatctctcctctctgacttcagaaatgatttctcccaatgagatttttgattttgatgccagctttatatctcactgtgattaggacggggccttatgatgggagaattagacttgaccaactatcatcagtttttgttttctcagtgagtttttggtgctctgatcttttttccttctatctgatttttgatacatgaacaacaaacatactagcaggaagtgatcacagagggagtttaaagaaaactatttttactgctgttgggaaaaggcatctggaaggcaattgaaactattcattaaaatttggtagtcatctatggggctccaaaatgattcagaattttcccaggatatttatattcttttgatattccttagaaatgtgaggtattctttagggcttttgggatagcaacaaacatgaaatgtgtaagaaatgcttctagaaaagtatttcttctgaaattattattttaatattattaaaatattaaaattttaatattaaaatattaaaattttaatattttagaactatttggtaacatttggaaaaaattattgaatatagataaacctaatgcagttattcagtctttagtctcagctcattgcttccaacataattatactttgtcaaatacagctaatcttaacaactactcatagccagaaaagcctttctttttttctttattattattattattattattcttcagcggaagtgctagcaaacagaaaaatgtattgataccagaaataaactctggtttgcaaattaaacttgaaattcttgagaaagtctgctcctcagcgttactgaaaactacaatcgttgggctcacttacctaccatatgccaaaaaaaattagatttttatatccagtaaagcaatccatttgagcttttccttgtgttcatagtgggtaactgtaggttcttaatatcaggaccacgtcccaaagttgcccatctaattgctcctcttaagtaactatattcaacaaggtactttaagatcaagtgacttaagtgaactctggaataatttaagaaggcccccaaatttctaatcattttaaaacattttataaataaaagttatgatctgcaactggacttaaataagattgcaggacacattttgtgttttattgttatcattaccattatattgggaatgcattcaagtaatttacagatacttttcacacgaatgcccttattggttaggtggtgacctgactctgggagccctgcctggatttcaggcagccctgcgcaaaggggcagcctcacttctgctcagagtggggctcgtctgtgggtgtgaggccactcctgtgtctttagcaaatgtcaggctccttttcccccctcactgctacccagctgccaatcccattcccagccttttagttctttaggcattttccttttctcttagtagaaaagaagttccaatagaaataccagaagccacattctcagtattacatcagcttttctctctttttcctttatcaactcccaaagaggagttggggctgagctgtcttacagttgaaacttgataggccatgaagtcctttcaggaaaagtgatttgttctttcagaatcgctaattcagtcttgtgatgccccacaagctgttctcagttttttgttccaccctagagcccagataacacattttccatattttccaacatataagtctgtggtgagccttgggttgtatttccaaatgtctagggttttctaaatgtcagagattcaggccacttcaattttcaatagcctctcacaaagcgaaaggctgtcataacaatgttcttgttttataaaattttgcatttaacctactagtgaatgtaaggcagaatattgcagtattatgtgtgcacaggataatttcaggatcagagaagataccacaattaataacacattggaagtagtgtgttctaataccggggcactaattttaagttccacaacagacatcttctttcattcccgccagcgcgtttctgggactttagtacagacaacctcatttggagataatctcaaaagtctacatttgagggcctttgtgaatatgaggcctcctgccacctgcagagaccttttctgtgacctttgctgtccttcaagaatgtgtcatttgcctctgagttttgaggctgggttaacatttatttcacatttgtttcaaagaagactgtatttttctctctttatagagaactctttaaatacatgacgttaggaaaccagttacacttgtttcagctgagctgaatttttaggggaattgttgctttggtttgctctctcaagcatttcatttcaacaaatactctctgtatggctataaccctctgcatggctgacgcattacacaggcttcaggtgttggaaacctatgcaacatttattatcttagacatggctccccagtgaatacctcggtggtaatcaagaataacattgaataatcctgacacgaaatcttgtgtctttctaccattcatctgcctctggtagtgttgacctggcagtggaagctctgaggcatgctgaagcagtttactgggctcattgtttctgattgacaggacatgctgtttgttgacagaatgacatcgtggtgcagagtgagggcagggaggtcattcagcatggtggggtttcacacagccagatggatcagagggtggccaaggggggctcagttaaaaaggggtttttgagtcattttcacagcagtatttgttggtgggaggagacaaagaataaaaaggaaagaaaaatagataaaggtattggagtgagagggggattgtaaagtagtgttttagtgttttgtgtggtttccactatcttttctactctcacgaaaaccctcaattctacttttatttttcttgtcttcactctggctgctgatggatgttaattaaccttcatattcctctatagtgatccaaggatacaatcttattgtcacaaaagtgacagcaattttatacactcattcaaatcctgtttttttgtgatagggtctcactgtcgcccaggctggagtgcagtggcattatcacgctcactgcagcctcccacttcagcctcccgaatagctgggactacaggcacgtgcctccatgcctggctaatttttttttttttttttttaattcttagtacacataaacccttgccatattgcccaggctagtctcaaacccttggactcaagcaatcctcccaccttaccctcccaaagtgctgggattataggcgtgagccactgtgcctggcccactcattcaaatctttaaaccacttgtagtgcaggtgataggaagggcatttgtgctagagaattcctagttatgacttctccacctttggtttccttctgtttgacatcagaacttctgcttagagtgactccagatccttagacgtggtctcatggatcttgcattcaaaatgaagttatgacattctgggggtttgagggagaatgtcctgtactttttttcctgctgaggcaaagccttaggtggagctttctcagggctgagttaaggggacagaagggattcatcagtgagggcatttcacaccctcatgtggcatttcacttggtagtgtccagatcggattgggttttttttcctctggttagtcacggtccttggaaagaaagatatgctggctcatgttgttatgtttaatctgcagggaaaatgggatcattagaagagccttcttggggctggatgcggtggcttacgcctgcagtcccatcactttgggaggccaaggcaagctgcttacttgagatcaggagtttgagaccagcctggccaacatggggaaatgccgtctctactaaaaatacaaaaatattagccaggtgtggtggcgcacacctgtagttccagctactcggtaggctgaggtggaaggatcacttgaacccgggaggcggaggttgcagtgagccgagactgtgccactgcactccagcctgggcaacagactgtgactccatctcaaaaaaaaaaaaaaaaaaaaaaaaaagaaaaaaaagaaaaagaaaagaaaagagaagaaacttggccttttggtgggttatggaatggtgggccacccagcaggaatggttgaacccaattcacaactctgacagttgctgcaaatgtaatcagatcatagaaatctggagaattctagacttgggagtgcagtggtttcagaaattataatctacttgagaacttcctgaaaccagagggtgtgggaactctattgttatagtttgtataggtcatcctcccagggaagcgaggagggtgaaggatgatggagagtggacgtggacttggaaagtcagatgtaccaatttctgcacccctgaagccttatagtctttaagaaagactcttctaatattttgttgtgttctcccctccatattctattgtttatgtcaattatattggaactatttttaaacagtagaactgggacttctctggtaatgaacagagctctgtcatgtaagggacttcaatgaacacttactaaatgagtgaataataagttaaccaataagtagaggagaagacatttttgatgtcttgaaaataagttcaatttaattttggttataattttttgacatcagaggaaagacagctgggtaaatagacctttccaagtactttattgcagtcatagatttgtttcttcctgaggggctgtctataggcaggtcttactttattcagaaatagtgctgtccaatagaactttctgcagtgatgtaaatgtgtatcttcactctgtcatattgtaaccactagtcatatgtggctattgagcacttgaaatgtggcaagtgactaggaaagcaaattattaattttattttattttaattaatctaaagatacatttagatagccacagggggttagtggctgccatgttggaaagcatagtattgaagggaaacatttacaccaaaatttatatatttgtagactaacattaataaatgaaatgcagtaccatagggctatgaattcaggaagtgttgtgcattttctgtaaagttatccttcatgtaggtttaaaaaatgatgtaaatgttctttttccttacatgaagatggttgttataaattctcagaacctgtgcctaattccagagggtgtttatttagacatgggcaacaccacattcttggccatcttatctaggatttttgtcagagagtgcttaataaatgctgataaccttgactacaaatgtgtattttccatatggcagagtttgatgattgccagatatggggaatttgtgaccagaagtgtgaaagccgacctggccgtcacctgtgccactgtgaagaagggtatatcttggagcgtggacagtattgcaaagctaatgattcctgtgagtaaattatggacacctgtgtctctgaacagtgaacagattctaatagcttctttccttccttctgatgacaacagaattatcagcatttttgttgttggcagggctttatcattacaaatcagggatggctcctactgcctagaaaaattggtcaacattaatttcatactttgattattaaggaccaatttgtcgactaatggtgaccattattaatattttttaattgattgattgtttactttgcctaggctatcatgtcacccacctttaattgtggaataaatgctatgcctacatttgattggcttggacatttaacttttaattaattacctaccacaaaagtaggcgacaactatctacagaaataattttcacagtgttcttgcaaaatttagggatatttccaaatggacatgctaaatttggattaacaattttttgaatgcactaactctgggtaatttgttggaatcagtgtaagagtatgaaaagtagagagtagtacagagtagtagagaaaagtcatggagaaaatctgcaaaaaatagatgagggctccaaagcattttgtcgctgttgatttctccggacgaaggtctcaatataaactcctattttccaatagttatttaacacttgattttgaagtgtctttggtgtcttctgaaacttaactgctcccatgactgaagaatggcccattttctacttgtttttgtgtagaaatacctgatttgctgtgtagtaacttttaggttcagcggatttttaacaattcaatgtgtttatttttgcataggtaacatatttatatgttcacaaattttaaattataagaagatatgtagtgaaatgccttcctccataactattcccctctgcatggttttcaccttctctttcctatgagtaattgccgtttctttattttagttctagagattttttaatgaataaacaagaacatacaaatatagatatttaactgtatttacatatctatatatggtagtaaactatatgcacagttctgcatcttgtgaatgtactgaagatattttccagagctttccatttcagcacatgaagttatttcttaattattttatttatttatttatttatttttatttatttatttttgagaatgagtctcgctctgttgcccaggctggagtgcagtggcgccatcttggctcactgcaacctccgcctcccgggttcaggcaattctctgcctcagcctcccgagtagctgggactacaggcttctgccaccacacccagctaatttttgtatttttagtagagacggggtttcatcatgttagccaggatggtcttgatctcctgacctcataatttacctgccttggcctcccaaagtgctgggattacaggcatgaaccaccgcatccggccttatttatttatttttgagatggagtcttgctcttgttgcccaggctggagtgcaatggcaagatcttgcctcactgcaatctccgcctctcgggttcaagcgattctcctgcctcagcctcctgagtagctgagattacaggcccccgccaccatgcccagctaatttttgtatttttggtagaaacagggtttccccatgttggccaggctgatctcgaactcctgacttcaggtgatctgcctacctcagtccctcaaagtgctgggattacaggtgtgagccactgcgcctggccttaattatttttttataatggcataatattccttcttttatgttcataatttgtttaactagtcctctactgatcaatttttatatcattccttatcttttgctattgccaataagactgcaattaataccttgttcatatatcattttgcatacctgcgagtaaacagacagaacagatttggaaccaccattaccatctttttcagagtgatttcctggtaatctttaaaatgtcttctgtgtttaacaaaatctaaagttgcacatggggctaaggtgcccataccatcaaggagtctcgaaaatatctgagaaatactctcctcagtgtcattgaaagtgcattggactagcatccagaatgcttgaattcttaccaaattcttcctaacttactgagattttggacgcttcattaagcctttttgtgcctcaatttgcccttctgtaaaatggatagaatgctagctatctgtctgcctcagaggtttatgttaaaatcaggtaagacaacctagaagatagcatttgaaaaagcagaaagcatatcatttgtaagctacttcaccatccttgctcatctgaaggagtggtgatgccttccttcttcgcatttagttggcgaggcctccattatcttctccaatggtcgggatttgttaattggtgatattcatggaaggagcttccggatcctagtggagtctcagaatcgtggagtggccgtgggtgtggctttccactatcacctgcaaagagttttttggacagacaccgtgcaaaataaggtaaatagaaatttcagtagctgaatggaaccctgagcacaaagtgttgatagcttttcacttttagagggagtagaggggaaagttcctttgttttctaacaaaaaaggcccttgagatattttatgttaatcagcaccttttccatgctatactattacatgtgacctattaaacaaagcagtctattatatggattagccttgagcaacttttaattttattcgaagtggagtccaggagcctaattaaaagaaatagtagacattctttcaaaactggatagatatttggtagtaatttttgaaatttgatcatttaaaatgtaaaaagcacactgcttttctggatgataaaaatcagatttttacctgcatcttctaaatggaactgtaattcgggatcgagtaacaaatattgacggtattttgtttaatggcccaaattttgtttcactgtcttatttggaaagtgtgatgggtttaatttcatcttggagtaatgcaatggagatttttgaaacataaatttcagaaactcttaaagagttatggaattttatttatttcttcttacattttattataccattaatacgattctcatttatttaaatgataacttgcatgaaatttctgaaaattgagaatttagatttttagcacttctgatttgattatagctaaaaaaaatcaaaacaaaccacgtagttagtgatgctgaagaaatataataattttggtttttctttcaggttttttcagttgacattaatggtttaaatatccaagaggttctcaatgtttctgttgaaaccccagagaacctggctgtggactgggttaataataaaatctatctagtggaaaccaaggtcaaccgcatagatatggtaaatttggatggaagctatcgggttacccttataactgaaaacttggggcatcctagaggaattgccgtggacccaactgttgggtaagtgatgtgaaaacatattgattcctgtatttttagaattttctctctccctctatacactgaacatctactggattaatcaaaggctcattctgatttcttttaggctgtatactctagaagccatgtctattttgtgcccttatttatagaagctttaagagagtttattaaatataatcctatttgaggacatgttacccaaacacacctagtggtgtactaaaaatacttgttgttttggggctatgaattttattcttagtgtttgccacgttttcctagctaagagattggattttgtgttctaactcaatctaataatattattacaactaaacatcacttatgcttcattattattaagatgattactctaacatgaattagctgtaaagatttttaaagatggaggttggaactattcctttcagaactttcttgatacaggctgggattgagatatcaatgctaatatctcattacaagttgttcagtctgaatcaatccagcaacaccgataatgcttttcttcaggtttaaatttaaatttcccaatcttcacatttgagaagtgttataggagacttagctttctcctagaatttcacaattgggtcttaggacccttggataagctttaggctattttagtctttgtgaatgatgattattcagttctacttcattatatcagctatccttccttgaaaatgacggaaatgttctctgtgcctcagaatggaaaactgaggagcaaaatggcttgatagcttcttttaaaaggtatttgtaagttttcctgggtgtaaaaaagagaagcaaaggacaaataaaggaaacagaggagaaagttcagaaggtgaatatgaattttttttttttgagacaggttcttgctctgttgcccaggctggagtgcagcagcacaatcacagcgtgccgcagacttgaacttctgggctcaagcaatcctcccacctcagcttcctgagtagctgagactatgggcaagtgccatcatgcccagctaatcttttaatttttgtagagatggggtcttgccatgttgcccaggctggtcttgaaacatgggcctcaagcaatccttctatgttggcctcccaaagtgctaggaccacaggcatgaaccactgtgcctggctggctgaatatgaacttttagactgccatattagtgcatcataatagttgctatttggaactgttgatgctcctgactgacccccacagtctctttaaaaaaaaaaaacaacttaatttccctgttgttttatactgtggttctctaatcagctggataaaatttccattgatccaaacacactgttaaaaaaaattcccaggttaacttgtaaaataccagattctttcatcttctgtttttcttttgtagttatttatttttctcagattgggagagcctttctggggaacctaagctggaaagggcattcatggatggcagcaaccgtaaagacttggtgaaaacaaagctgggatggcctgctggggtaactctggatatgatatcgaagcgtgtttactgggttgactctcggtttgattacattgaaactgtaacttatgatggaattcaaaggtaagaagtattttttatggcttatggctttataagttgcagggaaagtgcataaaatggctgcagagaaatatcaaaggaccagaattaaaatattgctttgttggtggacatgatagctttaatgacctttgtactgacatttgcatgaagtgacctgctctattttgttaacttttcttgtgtcccataacacaagaggtaaacgctcattaaatataacctccagcatttgttctttgatttctcctctccaactcttcccctagtcccacatgatgcacattattttcattcactcctgagttcatttgtgctttgtttctcaagatcactttcccttttaattttctaaccttcccccaataaatacatgttttattaggtatttgatgttgcctactgggaattaattggattttactctgctcttatatatttcaaatttcaaggagaaattctttgtattgtatttttacctggtatacaaagatacttaaacagcaatatttgaatgtagaatatggctttctttttttttttttttttttgagatggagtctcactctgtcacccaggctgaagtgcagtgatgcaatctcggttcactgcaaactccacctcccaagttcaagtgattctcctgcttcaacctccccagtagctaggattacaagcatacaccaccatgcctggcaatttttgtatttttagtagagataaaatttcaccgtgtttcccaggctggtcccaaactcctaacctcaagttattcgcctgcctcagcctcccaaagtattgggattacagatgtgagccactacacctggctgaatatggcatattttttttcatctttttactctgattagagctaactacaacttaatgtaaaaaaaattattttagatcctctccttttggtattttcaaaaattgggtaaaacatgttcttcaaattttgacccaaaatattattctttgtggattcagcaaataggctggttaacttaatttttcccaatgacttgattttattgttttctcaatgaaagcaatattatagttttgtttcctcttgtatttccattttgtaaggataatatcacagtttgccattggattatatatccttgggacaatctctgcttggttaaatgaagtattgtgtattaatatggtgacttcctatcactgaaactggcttccataaggagaatatgaataaattttatgaaaaaattagctaacccaataagtcacataaaataattgtgaaattgcttaaattttttctctttgggatgttttagcattatattatatagtctaacttttgctgaagtaaaaaaaagtaaagcataaaagataaaaatcaatggaatttcaaaaagatttgagtggtttgctggctgtgaagaaacatcaaagaaatattaaagctcacaagtacagctgaaatcataaagtcattgcctctcgctttgccagcaggtggcattcagggttttggaatttgctaactgagagagaaactattctctaatcttaatgtaccatgtcattatagaatgtttcaaagtgtgcactaacctgccaccttaggtttctttgtttactcccctttagtgtgtttcccagctttaatatcttcaagtcttttcttagagctctattgtcctttttagttttcaggggatgctaagatttttctttgaggtctttgtattacgccaaaataaagaaaataagagttttcccatatcaaccgtcctctgcctcactctgttcatgagtctaactgaatcattgtttatggagacatagtcacggggggcgttgttgatttcctctcttcgcttagtgcctaattttacttctgttttcttcccagttaagtggctttgggcctccattacaagtatgatcagttgatagttccatcaagcagatgcataagagtggtagtggcattgcttcttgctttccttacagtgacatcaggaacagatgtgggcgtttgctggggcttgaaccctaccactcactgtcctgctccctaattgctaggaaatgctcaatggtgcagtgggaaatagttggcaaaggcatcttttcccagacttccaaagtcttggtatactctttcacttatggtattcaaaatgctatttcacatcttagccttttagatgtggggcaacctaaaaggaatgaagaacaaaaggggaaacagtaaattccaaaaaagtctaggacaagctaaaggattgactgggactggaatgtaagtctcaagggtcttttccaagagacaacatgaaaatccttctatcatatgtagatggaaatatgtatacatctaaaatgtatcttttctatctattccgtatttgtgacaagaaattatttagcttttcaggcatttaattgaactaactacagctttaattataataaagcaaaactaacaaattgtatgatatatatgtgtcttttataacaggaagactgtagttcatggaggctccctcattcctcatccctttggagtaagcttatttgaaggtcaggtgttctttacagattggacaaagatggccgtgctgaaggcaaacaagttcacagagaccaacccacaagtgtactaccaggcttccctgaggccctatggagtgactgtttaccattccctcagacagccctatggtaagcctcagagcagtggtaaccatgcttggtaccggacttggtggaaaggttttctcaaagctttgaaagttaataatgaggggtcttatgtgatttgggtggcattctcaagtatatgaagggttacccagagtgttaaactctctgaaactggttctgcaggttaggagcattctgaagaaactgatgtatttcacagttaaatgccaaatctagagggaatttagagatttatttaacagatgtttattagcacctgcaaagatgcttgggggtatagcagctcacaaaccaaaccaaaatacctatcctcattctactgggaaagacatctatttcaaacttctaatattacagttaaggaaacaggtcccatagaagaaaatgacatgtctaagtgtccattttcggtagcatcagagccatttttttcttcttctctgttgcatatgtatggcacctgttctttggttctgattaatctgtcataggccaactgggtttggtgtctctctggctggtcacttattttaaaaaaagaaatattttgattcagacactgcttagtcttctcctgttattttaccacgtgattttttctttttattttttctgagatgggatttccactatgttggccagacttttctggaactccgggcttcaagcgatcctcctgccccggcttcccaaagtgttgggattacaggtgtaagccactgcacctggcctatcataagctttgtttatgtttccaggttatagcttgagctttgataagtctatcaggactgtatatagctcttttctgtatttgcttgtggatcaaagaaaaagaaacataaactacactacgttggtagaaagcttaatattggtgagcaataatttagaggaaaacagatttgctctaaaactcatgttaagtgatggatctatttaggatgaagaaagactgcaaagtaatgaggttaacttaacaaaagcccaaccactagaaatgacacattcagatgaatctccttcaatgtcatcatcctgggaaagtataaacttgtctaaaaatagatattttatctgaaaacatttttggaaatatctgttttgaatagtttttacactcaattcacaactaaactcacacctgccctcacattagatccattagatcaatgatcaatgtgatcactcaaattactattttcattatttggctcagaatgacatctgcctattgtttccccaaatcaatccacctgagaagataaagagaatattttaaagaataagtcaaaggctaaaaagacaattttgaaagcagatataaaatttctagctgtggcagtgctcttcctaaggtcactactttgagagtggcttttggaagtataaactggtttgtgttgcagacatttaaggttttggaatcagatctggctttgaatcctagtcaagctgtttagctgctgaataatgttgggcaagttatttaactgtttagattcttggtttctcctctgtaaaattggaggactaatacttacctcttagagctattggttaagttggtttacttacaaagtaagcatccagtgagtaatatttattatatcctacaaatggcaaaaaagcagtgaagtgtgggttttcttttgacaattatttctaatcatggaggatagcagacatactctgacataattattggggagaaagttgtaggagtcctttctttttttttgccaccgtctgttggagagtggatgggagagcagcagtgaaattgggagggttagtgtagccagatgtggatgtatccagtagtaaccagtagtaatgttttcaacacgttgctaatccattactctatttcacctataggtgaaaagggctagaagtggcttcatgtcttggataattacacatttctaattgcaatttaaccctgtgcatttttccttccagctaccaatccgtgtaaagataacaatgggggctgtgagcaggtctgtgtcctcagccacagaacagataatgatggtttgggtttccgttgcaagtgcacattcggcttccaactggatacagatgagcgccactgcattggtaagaagtctgttttggacgttgttggcaggtgacacaggtgtatgtgtgtccaaacctctaactagactaactgctactcttgaactggaccagctccctgtctaacttcttgactgcaaataagctttctgtagcccacagggcatcttccttggtaggcaccacttctactatacacagaactatgtttgaaaatgtaaatttctgtcttttgggattttgctttaatcccacatctaaggttttcttgggttcccttccccctttgtttcctgaagcctttttctcctattaactatgatcttgaaattccatatggttgaactttgagctcttttctatgctatgtataccttttccactttagatgttagccttaactttgatgggaagtactgtacttctccccactttgacttctcctagaccaccacgtatgcccctttcaaccaggtaatcacatctgaatcttatctggcttattttttctctctgtattccaaagtaaactcctgagcattggggtggctcagttactcacacagtttttcacctttcagttcaaactttcttgtatctgcctccatattcctgatttcattcttaccttgaaggtttcctttcttcctctttggtttcctacacatctattcacacttaagccatcgcctgggccccagctaatgatgaaatgcactcctacaatatttgtttttcttattttcacttctacatttctcctttctgtgcctgtgacaaattcttgctctccagatgttgcggtttctagcgtcgtatataaattatcttattctaacccagacacatttgttaacttcttaggtagttttagattcagaaaaatcaccctcattaaaaacaacatgtatttctaactattatatcaatagtgcgttgtctaataattttgcttttaaattccgttactgcgatttttatctttgtcttgggcatacctccttcatcttcttgactccctggcatcctgtcacagtctcctctttgctgttaaacatcacttcttcttacctatttcctttatccctccccttccttccctgctttcactcctttatatctttatatttctgattgctgttaattatcttggtatctactgtaaggttcttggtgtagatctctatgcagaagttaaaccaacttgaggattgttacggaattactatagagttcagctctgtatgatttttaaacaaaagattgatggcacaggtgagaaaggtttctgtgtgtgtgtgtgtgtgtgtgtgtgtgtgtgtgtgtgtgtgtgcatgttttgcctgtttattgtaatgatacttataacttgataattaaaactcagtatctaatttttaagcagtcctttttattttatttatttatactattttactttaagttctagggtacatgtgcacaatgtgcaggtttgttacatatgtatacatgtgccatgttggtgtgctgcacccgttaactcgtcattacattagatgtatctcctattttataaattaagcatatggatatcatttttcatataaatacattttaaggatacatttcttaggaagaaggaagattctaatacttgtatctccctcatagttgcttatctttttttcttccctgtattatttctaactatgctttccaaaaatttatttttacatttatttcagaattatattttataatttaaagtttgctctgtggatgcatttatctggaatttgggaggagagaaaagaaccatgctgtgactgactgtgctgtgttattcttcctacagctgttcagaatttcctcattttttcatcccaagttgctattcgtgggatcccgttcaccttgtctacccaggaagatgtcatggttccagtttcggggaatccttctttctttgtcgggattgattttgacgcccaggacagcactatctttttttcagatatgtcaaaacacatgatttttaagcaaaagattgatggcacaggtgagaaaggtttgtgtgtgtgtgtgtgtgtgtatgcgtgttttgcctgtttattgtaatgatacttacaacttgataattaaaactcagtatctaatttttaagcagtcttatttatttatttatttatttatttatttatttatactattttactttaagttctagggtacatgtgcacaacgtgcaggtttgttacatatgtatacatgtgccatgttggtgtgctgcacccgttaactcgtcatttatgttaggtatatctcctaatgctatccctccccctccccccaccccacgacaggccctggcgtgtgatgttccccatcctgtgtccatgtgtgctcattgttcaattcccacctgtgagtgagaacatgtggtgtttggttttctgtccttgcaatagtttgctgagaatgatgatttccaatttcatccatgtccctgtaaagaacatgaactcatccttttttatggctgcatagtattccatggtgcatatgtaacacattttcttaatccagtctatcattgatgaacatttgggttggttccaagtttttgctgttgtgaatagtgccgcaataaacatacgtgagcatgtgtctttatagcagcatgatttataatcctttgggtatatgcccagtaatgggatggctgggtcaaatgttatttctagttctagatccctgaggaatctccacactgtcttccacaatggttgaactagtttacagtccctccaacagtgtaaaagtgttcctatatctccacatcctctccagcacctgttgtttcctgactttttaatgatcgccattctaactggtgtgagatggtatctcattgtgattttgatttgcatttctctgatggctagtgatgatgagcattttttcttgtgtctgttgcctccataaatgtctttttttgagaagtgtctgttcatatccttcacccactttttgatggggttgtttgattttttcttgtaaatttgtttaagttctttgtagattctggatattagccctttgtaagatgggtagattgtaaaaattttctcctattctgtaggttgcctgttcactctgatggtagtttgttttgctgtgcagaagctctttagtctaattagatcccatttgtcaattttggcttttgttgccattgcttttggtgttgcagtcatgaagtccttgcccacacctatggcctgaatggtattgtctaggttttcttctaagggttcttatggctttaggtctaacatttaaatctttaatccatcttgaattgatttttgtataaggtgtaaggaagggatccagtttcagctttctaaatatggctagccagttttcccagtaccatttattaaatagggaatcctttccccatttcttgtttttgtcaggtttgtcaaagatcagatggttgtagatgtgtgatatcatttctgaggactctattctgttccattggtctatatctctgttttggtaccagtaccatgctgttttggttactgtagccttgtagtatagcttgaagtcaggtagtgtgatgccttcagctttgttcttttggcttaggattgtcttggcaatgcaggctcttttttggttccatatgaactttaaagtagttttttccaattctgtgaagaaagtcattggtagcttgatggggatggcattgaatctataaatcaccttgggcagtatggccattttcacaatattgattcttcctatccatgagcatggattgttcttccatttgtttgtgtcctcttttattttgctgagcagtggtttgtagttctccttgaagaggtccttcacatcccttgtaagttggattcctaggtattttattctctttgaagcaattgtgaatgggagttcactcatgatttggctctctgtttgtctgttattggtgtataggaatgcttgtgatttttgcacattgattttgtatcctgagactttgctgaagttgcttatcagcttaaggagatattgggctgagatgatggggttttctaaatatacagtcatatcatctgcaaacagggacaatttgacttcctcttttcctaattgaataccctttatttccttctcctgactaattgccctggccagaacttccaacactatgctgagtaggagtggcgagagagggcatccctgccttgtgccagttttcaaagggaatgcttccagtttttgtccattcagtatgatattggctgtgggtttgtcataaatagctcttattattttgagatacatcccatcaatacctagtttattgatttagcatgaagggctgttgaattttgtcaaaggccttttctgcatctattgagataatcatgtggtttttgtctttggttctgtttatatgctggattacgtttattgatttgtgtatgctgaaccagcattgcatcacagggatgaagcccacttgatcatggtggataagctttttgatgtgatcctggattcggtttgccagtattttattgaggatttttgcatcaatgttcatcagggatattggtctaaaattctctttttttgttgtgtctctgccaggctttggtatcagaatgatgttggcctcataaaatgaattagggatgattccctctttttgctttgattggaatagtttcagaaggaatggaaccagctcctctttgtacctctggtagaattcggctgtgaatccgtctggtcctggacattttttgggttggtaggctattaattattgcctcaatttcagaacctgttattggactattcagggattcagcttcttcctggtttagtcttgggagggtgtatgtgtccaggaatttatctatttcttctagattttctagtttatttgcatagaggtatttacagtattctctgatggtagtttgtatttctttgggatgggtggtgatatcccctttatcattttttattgtgtctagttgattcttctctcttttcttctttattagtcttgctagcggtctatcaattttgttcattttttcaaaaaaccagctcctggattcattgattttttgaagggttttttgtgtctctatctccttcagttctgctatgatcttagttatttcttgccttccgttagcttttgaatgtgtttgctctcgcttctctagttcttttaattgtgatgttagggtgtcagttttagatctctactgctttctcctgtgggcatttagtgctataaatttccttctacaccctacttcaaatgtgtcccagagattctggtgtgttgtgtctttggtctcattggtttcacagaacgtctttatttctgccttcatttcgttgcttacccagtagtcattcaggagcacgttgttcagtttccgtgtagttgagtggttttgagtgagtttctggatcctgagttctaatttgattgccttgtggtctgagagacagtttgttataatttctgttcttttacatttgctgaggagtgctttacttccaactatgtggtcaattttggaataagtgcgatgtggtgctgagaggaatgtatactctgttgatttggggtggatagttatgtaagcagagattttactaagcttcctaaatagttttagattgagaaaataaatttattgcttttttatggattaaggtaaaacaaacacctttcctttattttagaaacacgttatttttgggaaccgagacgggaggattgcttgaggccgggagtttgagaccagcctgagcaacatagtgagattccacttgtaccaaaaaaagaaaaaaattagccagatgtggtggcatgtacctgtagtccccactacttgggaggctgcaatggaaggattgtttgagcccaggagatccaggttgcagtgagctatgaccataccactgcactccagcttgggcaacagagtgcaaccctatctcggaaaaaaaaaaaaaaaaaaaaggttacaaacgtgtgtgtattttaacaatgaccaatgttaacataaaagaaatgtcacgtgtatgagagccattaacagattaattgactagacactgtttttcatactcaagcagccagattgattaaaggggaagacatctcttcagggatgctggactatgtaaatgccaagggtttggtttgtaatagtaataaaatttgtaagcaatataacataccaactaagagagccagcttaggagctacactgcctggttccaaattccagcttcccacatttcctagctttgtaactttggggaagttactcaatttccttttgcctcaattttctagtctgaaaaatatgcggttcatatattgctcataaggttgttgagagaatttttggctaatgcatgtaaacacctagagtaatggctagaaaatagtaaatattcagtaaatgttggatatcattttatctgttatcaatataaaaccatattgcccaccctcccctgcccctaatccagacctgctctggggagggaacagctcttttgactatttcttcttttgtttgtctccatgtttctaaatgctttgtttatacttctatttcttgatttatcatttttgatatttacttccttgttctaggtgagcgttttgctttcttacatcattcttctctcccagcttctgacttccctccccccattctccttaaaaagctagattataatttttggttaaattaatcatatgtgtttatattattaacataatataaatataaatattgttcactgctcagccaattagtattctaggatgacatttcttgacaatttttgacaattgccccattttcatttgcttagtttttaaatataacaatcatgtattttccccaaatgctctaatagctctatcaaatgcctgtacaaagacagaaaacaatctataattttttttttctttctggagacccctatcctgtgttccaattgggacttgtttttctctggcctggtgcacagacttctctttgccactcccctgtgctggaacttctgtttgtggcaggccatttatttctttttctagatttatttcctcattttgctgaaacaagttacatgatagcttcctgagaaacataagtaggtggcatatattttgagtctttgaatgtctgtgagtgttttattttgctctccatcttgactgtttggctgggtacaggttgcaagttaatttaaacctggaatttgaagacattgctctagtgacgtctaatatctagtgttgagtccagtgccattctgagtaccatttctatggatatgactttgatatggatatggatatgacattaaaaattaatcttcctctgtttccattttctctggattccttttccttttgatttcttttcaactttcttctttttgatggaagctttttccaagtgtctgagttgctagtttggtattaagggtgaggttataaaacctgacccaaaagtctgtacatgtggataggccttgtcagctggtgagcttcaggcaggaaggtggcttggttgccagattgctccccaaggcaacattagtgagtcttttctggagatggtcaatttctccttcatagatgcctccattttccttcatgaggtaaggggaagatgtggggagatggtggtctgttctgggggtgattaatttctcctccatagatgccttcattctccttcttggagtaaggggaagatgtgggaagatggtggtctgttctgggggtgattaatttctccttcatagatgccttcattctccttcttggggtaaggggaagatgtggggagatggtggtctgttctgggagtgggcagaggaaagggagctgagggcgccctttcagtattcctataatcctcctgtactcagttccacatccatctcagttctgtgttgaggactgtgccttgaacccatagccattctgcttcagctcctccagagaaaatctgtggtcccttagaggagatagaggagtggcgtgacactcaggatctgggagggacctaggcattggattgctccttatcttgctttatctgagccccttagttcctcgcccctgcctttgttaggacctggtgcctctgagtgtgagtgcactgaggcttctgcatatgtgggtgtgtctctcttctgttgacacttagtttgtagcattttccccttcttaactgagttatcactcctccaataccttacttttcaaacatttgttggaattactcatctgctgttattttactgtcttttaagtagaatttcggaggaagaggagataaacatgtttggtttgtcaatctgctattttgaatgagaaattatcttttttgaggacttagaatcaggcccactgagcttggagcactgcagtcgagcttagttctcaggaaaaggtagtattgggtttctagctgcatgcaggccaagtctcccacaggcacctccacaggtcagcttccttctgttttgttgatctggaattctcatagtatttttggtaaacttcaagttcgtatgctgagcaacctacctttttttaatttttttatttttatttatttatttattattatactttaagttttagggtacatgtgtacaatgtgcaggttagttacatatgtatacatgtgccatgctggtgcgctgcacccactaactcgtcatctagcattagttatatctcccaatgctatccctcctcccgcgccaccccacaacagtccccagagtgtgatgttccccttcctgtgtccatgtgttctcattgttcaattcccacctatgagtgagaatatgcagtgtttggttttttgttcttgtgatagtttgctgagaatgatgatttccaatttcatccatgtccctacaaaggacatgaactcatcattttttatggctgcatagtattccatggcatatatgtgccacattttcttaatccagtctatcattgttggacatttgggttggttccaagtctttgctattgtgaatagtgccgcaataaacatacgtgtgcatgtgtctttatagcagcatgatttatagtcctctgggtatatacccagtaatgcgatggctgggtcaaatggtatgtctagttctagatccctgaggaatcgccacactgacttccacaatggttgaactagtttacagtcccaccaacagtgtaaaagtgttcctatttctccacatcctctccagcacctgttgtttcctgactttttaatgattgccattctaactggtgtgaaatggtatctcattgtggttttgatttgcatttctctgatggccagtgatggtgagcattttttcatgtgttttttggctgcataaatgtcttcttttgagaagtgtctgttcatatcctttgcccactttttgatggggttgtttgtttttttcttgtaaatttgtttgagttcattgtagattctggatattagccctttgtcagatgagtaggttgcgaatattttctcccattttgtgggttgcctgttcactgtgatggtagtttcttttgctgtgcagaagctctttagtttaattagatcccatttgtcaattttggcttttgttgccattgcttttggtgttttagacatgaagtctttgcccatgcctatgtcctgaatggtaatgcctaggttttcttctagggtttttatggttttaggtctaatatttaagtctttaagccatcttgaattgatatttgtataaggtgtaaggaagggatccagtttcagctttctacatatggctagccagttttcccagcaccatttattaaatagggaatcctttccccattgctttttttctcaggtttgtcaaagatcagatagttgtagatatacggcgttatttctgagggctctgttctgttccattggtctatatctgtgttttggtaccagtaccatgctgttttgcttactatagccttgtaggatagtttgaagtcaggtagtgtgatgcctccagctttgttcttttggcttaggattgacttggcgatgcgggctcttttttggttccatatgagctttaaagtagttttttccaattctgtgaagaaagtcattggtagcttgatggggatggcattgaatctataaattaccttgggcagtatggccattttcacgatattgattcttcctacccatgagcatggaatgttcttccatttgtttgtatcctcttttatttcattgagcagtggtttgtagttcttcttgaagaggtccttcacatcccttgtaagttggattcctaggtattttattctctttgaagcaattgtgaatgggagttcactcatgatttggctctctgtttgtctgttattggtgtataagaatgcttgtgatttttgtacattgattttgtatcctgagactttgctgaagttgcttatcagcttaaggagattttgggctgagacgatggggttttctagatataccatcatgtcgtctgcaaacagggacaatttgacttcctcttttcctaattgaataccctttatttccttctcctgcctaattggcctggccagaatttccaacactatgttgaataggagtggtgagagagggcatccctgtcttgtgccagttttcaaagggaatgcttccagtttttgcccattcagtatgatattggctgtgggtttgtcatagatagctcttattattttgagatatgccccatcaatacctagtttattgagagtttttagcatgaagggttgttgacttttgtcaaaggccttttctgcatctattgagataatcatgtggtttttgtctttggctctgtttatatgctggattacatttattgatttgcgtatattgaaccagccttgcatcccagggatgaagcccacttgatcatggtggataagctttttgatgtgctgctggattcggtttgccagtattttattgaggatctttgcatcaatgttcatcaaggatattggtctaaaatgctctgttttggttgtgtctctgcctggctttggtatcaggatgatgctggcctcataaaatgagttagggaggattccctctttttctattgattggaatcatttcagaaggaatggtaccagttcctccttgtacctctggtagaattcggctgtgaatccatctggtcctggactctttttggcaacctaccttttaaaatattcctcatagtcagtggttaaactctgtatgctttgttgagggaggcattacattgttcttttttttttttttgaatgagtacacagtatatgcaggaaatgagttgtcagaaatcaaattagctaatgtggtggtgtggtgtagtgccagatacttgggaggatcacttgaggtcaggtgtttgaggctgcagtgggctatgactgtgccactgcactccagcctaggtaagacctgtctctaaagaaaaagaaaaagaaatcatattaaaagtcaggattagctgaatgaagccctcaggagaactccctccttcaatgataccttcttttttccaaattctctttttctactgacttttccctatcatcagatatgctcaagtttctcccatcctaaaaaatatgcaacttacccttcactccatgttcctctttagtgataaccccttctctgcatttcatggtcaagtttcttgaaaggttgttttgcactttcctatcccttcttccacatttctcactgattactcacctcttgcaatctgcccaccaggtggctgacacccctctcatcctggtcacctctaatccctttcttgctaaattaaataatgcctatcagtcctgtatttggtacttcagccatcttctctcaaatattctttcttccatgacagcatactcctggatttccttctatttcttgatcatttttttttttctagtgtaccctggagatcttttctttttctcctgttctataaaaaactgtaaatctgttgttcaacattggtcctcctctctctgaataatttcacacctttcctgcctttgattactatctatgtagcaactataaataattatggggagacttttataatagtgcatttactgagtgtttttcctcctaaactggggaatgagggaaagaccaagcaagcctttctgtaggtcatgataaaaatctctatgcaagttctctctctgaggttcagacccatagtgccagctgccttttggatacgtcacctggatatcctacaatcacctctaaaccaacatgtctaagtggatgcttcatccaacttctcacaggccttagaggaagggcatgaccactcaccccttccttggtgccccatccccacctggtggtcatcatgaacatctccctctcttttagcctctatcattaactcattaacctccagccacactcctagaacatgtagagttttcagtctctgtgtctgtcaaccaccccagacctctgctttgccatgtggcccattaggaatctgtgctctcagaccatcctatgcatctctccatctcagcactcattactcttttatttttgtctcttggcctagttgcctcctcctctttcaccacctcactatgaattaccttgagggtggtgtccacacttctttccagatgcttaacttctctttgacttggttctctcatctgtagaataggaacgatactaatgcctacttgattgagtggctgtgaggatggatgaatccatgtagaatacttggtccagtttctgccacctagtaagtgctcatttaatctaagctgtgattattaacactactaacaatattgtgttttctaaatatatagttggctttctatcacatagagaactttcttttcacaatttgctgaataaatgaagagaaaaagtagtaggattttttcttcctactgcaaaagaaagaggtatggctgtttattctgattcagattttctttagtgaaaaaaagaaaaaagagggtaaaagaaagcataataactccataaagaggaaagcgtttttttttttttgttgttgttgtttttaatcagttctgatttcctttctggtatctctgctggtgttttcaaaacttggcaactttgtggctgtggaagactgttgatgagagggttgggcgatgatacctcagggttaccctcaggtcgtacctggtggtgtcagcttatcagagccgtctccgggtggtagtaggtgaactcaggtatctcttcttcagatattctacagtgagaaatttttttctggaaggttggacatgggagtaaatccaggccataccattcctggttctgtttgtcagtatcatatctactctttgagatccaaagtttgaggaatggatagattctaggtttgtctcatgttattgctcagcagcttacagagtttttttttttttttttttttaaagaattccacatgtgttcctgaaatatgctctaactctgacacaaaatttcagtgtgcattagtaggaaaattgatgccttacaaaatatacttagcttaaaatatgtccatattttaacttataggaagagaaattctcgcagctaacagggtggaaaatgttgaaagtttggcttttgattggatttcaaagaatctctattggacagactctcattacaagagtatcagtgtcatgaggctagctgataaaacgagacgcacagtagttcagtatttaaataacccacggtcggtggtagttcatccttttgccgggtaagtgtgttcatgttttcctaagagcttgaaactgtatgtcttttacagtcattgaaaagtgatgccctagggatttaggtaagttcagcaaatataagattgaactgtataagttgaaatcaccttaaattttatttcttttttcctccaaaaaactttattctgggggagtaaaaaaaattgtttttaaacccaaaacatttcttctaacttttggctttctcagtcttcactgaagagtagtttttttcacagttgcagaggaccaaacaatgtgatatagattcagtagaaaaggagtgaataggcaacagaattaacaggaaagacccaaattctttccctgctttaatatatttatataaagcttagcaaaacttgcttaatcattcagtagttttcagaataaaaagtttttcagaccacaaagtttcatgttttaccattctataattggtggtgccagacaaggaaagacagaagagttcacagtattcctttttggttcctacttttcttatttaaatatgtttaacagctactgtgtttatttagaacaaatctgagctatgtgttgtatatgagtggaatgataaaaaagatggctgctaacccaccaatgcctgattacccagggaacatccatacctgttcttccgttagatatataatctcatcagcttccaaagctagtttgtgaaggaggtatgtgtaaatacccattttagagagaatgaatctaaggcgcagtgagataaagtgacttgtgaaagggcccgcagctattaggcaacagtcagtattcaaattccagacctgtctgactggaatgcctgtgtgcctaaaaaagtctgtttgctgcatctagagtatctgctttaatttcctctctgtaagataataaaagaaacacattttaaaactgatgttattattgataagaaatttcattgccctatagagagttaaacagtttagttttttaatgaatttgtcttaactcaaacttttggcctttggttttgaaaaactgttgaattcctttcctgatgactcttttgtttaaaatgatatgaagtagttacatttcagaaagttacattttggaaaagaataattttgattcctctggatcccataaaagagaaaaagttgtttttttattttcttttgttttttttgtgttttttttttttgtttttgtttttttttgcctctagacttatctttttcccactctttagaatattaaaaaaatgcttgggtcagatactgtttgcattgcattgatttggatgctttcttcatctgagatgaatggtttcctgcaaatttatcaattccttatggaagaatgactagaggatcctgaatgtttaatctagagagaaagagattgaaatgttttcttgctctgttcgttgtttattattttattttaataacgtggaatatttaataggtaacctgaattgtgtcttgttagagaatatgttaggcgacaatagttttagttcctaaactctgagacagtggttctcttctctcaatgcccatttaaatgccatttgtatttgtgactttggttacatgttaactaaattttaactgagaattacatgagttatacactaagtatgttaagttcaatagcatataaagaaaacaaaattaattgcagtatctggagaatctctgtttgttctaaatctctggaagtcatgtagtttgtcccagtgttaacagccttaatttactactgctttttctaggtatctattcttcactgattggttccgtcctgctaaaattatgagagcatggagtgacggatctcacctcttgcctgtaataaacactactcttggatggcccaatggcttggccatcgattgggcgtaagtaggaatcatcatccccgatacttagttctcttttactgcagaacacataatgaggcaggttgggtgatatgatggtgtaaggaaactggtactgcttgccctcgcggaattttaaataattaattggtgatgggagaaggatattgaacaagaacacaaaggacataaacatagttggccagctactgctggggtgaaaactaataaattcatgagtattctgagaaaattgctagagaaagctgaatgacaagatttagtggaaactcaagatgggggaggtgggtcccaagcagcatttaaagtagggtacagatttgttgaactgtaggcagtgtgtaatttcttacagggaacatcttgagtttaggaaatctttggagtcaattaatcaacaaatgcacctttgcttacatgcactttgggaggactttaaaagtataagctatggttctcaagaaattgatgatctatctaggaatataggaaaaggaatagagtaaataagcttataaagatgaaatgccaaggtaacttatgggagaaaaaaagggaagaaatatatttcaccttttaaacatagattactaccactgtttttcttaacttgttgatttcacaaggagaaaataaaatttctggctcaaagatagcaacattttaagttttctaagacaattgattgaaagccacttcatgaaaagtagccgtctctttctgggggacataaaactgttaaatttttaatgaatataatttaaattttaaaaactttgtttaataaatgtgtcaactgaccctactgtttttggatgccctttgtgtaaagggtgctctgatagtttttggataagagataactaaatattttattattttagtgcttcacgattgtactgggtagatgcctattttgataaaattgagcacagcacctttgatggtttagacagaagaagactgggccatatagagcagatgacacatccgtttggacttgccatctttggaggtatgttttaaagcaataaaagtatgtattgtttttatacattgcaagttacaatagtaaactcatcctcatgtggcattttcacaatcccagaaaagctggccactttaaaatgaaaaaatttaaaatggtgctatatatttagacaaaacatttggtttgttgatggtgtatttcatttttagagtgtgatttttgttttgtatatattcgtataatgttgacagtgtatatgggtacagcactttgtagattacatgtattatacaattcaacatcccaagtacttagttatacaagtatcacgtgaggaaacagtaaattactgccttcattttcaagaataaaacagcaagagctgtttatagtaatcattgtagcatttcattattctccagtgtttgtaagaatctcattagaaatccttgtggaaaaaacgattacacatattcatcaactatatgctgactgaatgactttgaaacttttttattcaaaatgttggagaactgacatcgtctttgttttatggaagtgttaggttatgctttatgaagaacagcaagacataattttttttcgtcaacctttccaaataatttcatgctactagtgaagattgctgagaagcatgaattctggggaactacagtcacaatgagcacagccagtgcttgcctgtcttctcagctccccatttgagtgcaggcatgctgctgtgagttgagtttctgggaataagaatgtagcctggtaccatgaaacaggtggtttgcttagtcttgaaaacaggagctctgtgaatggttgtatagcttgtgcactgcataaaaatgccaggccaagagggtgaggagacactgaaatctatcctgggtctgtttgacaaaccatgattactccagttagaggggtcatgttttgtttaagtctaccaaaagccctgtgtatatgctagttgtgtccctggttgaaacctcctactttgaataattaacacagtgcttgaaaagactagacactcactataaatcaaagactttctcacatgcatagaatgtatgtgtggaatgaatagttagtaagtatattgcatatcttgtcctgctgtctgtttatctgtggaggagtgtgtggtatttaaaaaatgctcatgagatttttgatgagttaattataaatactcctcccgtccccctcccgccgctgccatccatttactcccttttcactaatgatgtcagacacatgctatttgctgtcacatagaaacattataaaaagttgaattttctctgctctgggctgggatgttttgggattcgagaaaatgtagttttagtatcttttggtttcatcagtatgaaaaaaatttgaatgcatacccatgaggacaacacaacattcccaaaatagcaataattatttatttctttcaacattgctgtttttttttttttttattatactctaagttttagggtacatgtgcacattgtgcaggttagttacatatgtatacatgtgccatgctggtgcgctgcacccactaatgtgtcatctagcattaggtatatctcccaatgctatccctcccccctcccccgaccccaccacagtccccagagtgtgatattccccttcctgtgtccatgtgatctcattgttcaattcccacctatgagtgagaatatgcagtgtttggttttttgttcttgcgatagtttactgagaatgatggtttccaatttcatccatgtctctacaaaggatatgaactcatcattttttatggctgcatagtattccatggtgtatatgtgccacgttttcttaatccagtctatcattgttggacatttgggttggttccaagtctttgctattgtgaatagtgccacaataaacatacgtgtgcatgtgtctttatagcagcatgatttatactcatttgggtatatacccagtaatgggatggctgggtcaaatggtatttctagttctagatccctgaggaatcgccacactgacttccacaatggttgaactagtttacagtcccaccaacagtgtaaaagtgttcctatttctccacatcctctccagcacctgttgtttcctgactttttaatgattgccattctaactggtgtgagatgatatctcatagtggttttgatttgcatttctctgatggccagtgatgatgagcatttcttcatgtgttttttggctgcataaatgtcttcttttgagaagtgtctgttcatgtccttcacccactttttgatggggttgtttgtttttttcttgtaaatttgtttgagttcattgtagattctggatattagccctttgtcagatgagtaggttgcgaaaattttctcccatgttgtaggttgcctgttcactctgatggtagtttcttttgctgtgcagaagctctttagtttaattagatcccatttgtcaattttgtcttttgttgccattgcttttggtgttttggacatgaagtccttgcccacgcctatgtcctgaatggtaatgcctaggttttcttctagggtttttatggttttaggtttaacgtttaaatctttaatccatcttgaattgatttttgtataaggtgtaaggaagggatccagtttcagctttctacatatggctagccagttttcccagcaccatttattaaatagggaatcctttccccattgcttgtttttctcaggtttgtcaaagatcagatagttgtagatatgcggcattatttctgagggctctgttctgttccattgatctatatctctgttttggtaccagtaccatgctgttttggttactgtagccttgtagtatagtttgaagtcaggtagtgtgatgcctccagctttgttcttttggcttaggattgacttggcaatgcgggctcttttttggttccatatgaactttaaagtagttttttccaattctgtgaagaaagtcattggtagcttgatggggatggcattgaatctgtaaattaccttgggcagtatggccattttcacgatattgattcttcctacccatgagcatggaatgttcttccatttgtttgtctcctcttttatttccttgagcagtggtttgtagttctccttgaagaggtccttcacatcccttgtaagttggattcctaggtattttattctctttgaagcaattgtgaatgggagttcacccatgatttggctctctgtttgtctgttgttggtgtataagaatgcttgtgatttttgtacattgattttgtatcctgagactttgctgaagttgcttatcagcttaaggagattttgggctgagacgatggggttttctagataaacaatcatgtcgtctgcaaacagggacaatttgacttcctcttttcctaattgaataccctttatttccttctcctgcctgattgccctggccagaacttccaacactatgttgaataggagcggtgagagagggcatccctgtcttgtgccggttttcaaagggaatgcttccagtttttgcccattcagtatgatattggctgtgggtttgtcatagatagctcttattattttgaaatacgtcccatcaatacctaatttattgagagtttttagcatgaagggttgttgaattttgtcaaaggctttttctgcatctattgagataatcatgtggtttttgtctttggctctgtttatatgctggattacatttattgatttgcgtatattgaaccagccttgcatcccagggatgaagcccacttgatcatggtggataagctttttgatttgctgctggattcggtttgccagtattttattgaggatttttgcatcaatgttcatcaaggatattggtctaaaattctcttttttggttgtgtctctgcccggctttggtatcagaatgatgctggcctcataaaatgagttagggaggattccctctttttctattgattggaatagtttcagaaggaatggtaccagttcctccatgtacctctggtagaattcggctgtgaatccatctggtcctggactctttttggttggtaaactattgattattgccacaatttcagagcctgttattggtctattcagagattcaacttcttcctggtttagtcttgggagagtgtatgtgtcgaggaatgtatccatttcttctagattttctagtttatttgcgaagaggtgtttgtagtattctctgatggtagtttgtatttctgtgggatcggtggtgatatcccctttatcattttttattgtgtctatttgattcttctctcttctttctttattagtcttgctagcggtctatcaattttgttgatcctttcaaaaaaccagctcctggattcattgattttttgaagggttttttgtgcctctatttccttcagttctgctctgattttagttatttcttgccttctgctagcttttgaatgtgtttgctcttgcttttctagttcttttaattgtgatgttagggtgtcaattttggatctttcctgctttctcttgtaggcatttagtgctataaatttccctctacacactgctttgaatgcgtcccagagattctggtatgtggtgtctttgttctcgttggtttcaaagaacatctttatttctgccttcatttcgttatgtacccagtagtcattcaggagcaggttgttcagtttccatgtagttgagcggctttgagtgagattcttaatcctgagttctagtttgattgcactgtggtctgagagatagtttgttataatttctgttcttttacatttgctgaggagagctttacttccaactatgtggtcaattttggaacaggtgtggtgtggtgctgaaaaaaatgtatattctgttgatttggggtggagagttctgtagatgtctattaggtctgcttggtgcagagctgagttcaattcctgggtatccttgttgactttctgtctcgttgatctgtctaatgttgacagtggggtgttaaagtctcccattattaatgtgtgggagtctaagactctttgtaggtcactgaggacttgctttatgaatctgggtgctcctgtattgggtgcataaatatttaggatagttagctcctcttgttgaattgatccctttaccattatgtaatggccttctttgtctcttttgatctttgttggtttaaagtctgttttatcagagactaggattgcaacccctgcctttttttgttttccattggcttggtagatcttcctccatccttttattttgagcctatgtgtgtctctgcacgtgagatgggtttcctgaatacagcacactgatgggtcttgactctttatccaacttgccagtctgtgtcttttaattgcagaatttagtccatttatatttaaagttaatattgttatgtgtgaatttgatcctgtcattatgatgttagctggtgattttgctcattagttgatgcagtttcttcctagtctcgatggtctttacattttggcatgattttgcagcggctggtaccggttgttcctttccatgtttagtgcttccttcaggagctcttttagggcaggcctggtggtgacaaaatctctcaacatttgcttgtctataaagtattttatttctccttcacttatgaagcttagtttggctggatatgaaattctgggttgaaaattcttttctttaagaatgttgaatattggcccccactctcttctggcttgtagggtttctgccaagagatccgctgttagtctgatgggctttcctttgagggtaacccgacctttctctctggctgcccttaacattttttccttcatttcaactttggtgaatctgacaattatgtgtcttggagttgctcttctcgaggagtatctttgtggcgttctctgtatttcctgaatctgaacgttggcctgccttgctagattggggaagttctcctggataatatcctgcagagtgttttccaacttggttccattctccacatcactttcaggtacaccaatcagacgtagatttggtcttttcacatagtcccatatttcttggaggctttgctcatttctttttattcttttttctctaaacttcccttctcgcttcatttcattcatttcatcttccattgctgatacccttacttccagttgatcacatcggctcctgaggcttctgcattcttcacgtagttctcgagccttggttttcagctccatcagctcctttaagcacttctctgtattggttattctagttatacattcttctaaatttttttcaaagttttcaacttctttgcctttggtttgaatgtcctcccgtagctcagagtaatttgatcgtctgaagccttcttctctcagctcgtcaaaatcattctccatccagctttgttctgttcctggtgaggaactgcgttcctttggaggaggagaggcgctctgcgttttagagtttccagtttttctgttctgttttttccccatctttgtggttttatctacttttggtctttgatgatggtgatgtacagatgggttttcggtgtagatgtcctttctggttgttagttttccttctaacagacaggaccctcagctgcaggtctgttggaataccctgccgtgtgaggtgtcagtgtgcccctgctggggggtgcctcccagttaggctgctcgggggtcaggagtcagggacccacttgaggaggcagtctgtctgcccgttctcagatctccagctgcgtgctgggagaaccactgctctcttcaaagctgtcagacagggacacttaagtctgcagaggttactgctgtctttttgtttgtctgtgccctgcccccagaggtggagcctacagaggcaggcaggcctccttgagctgtggtgggctccacccagttcgagcttcccggctgctttgtttacctaagcaagcctgggcaatggcgggcgcccctcccccagcctcgttgccgccttgcagtttgatctcagactgctgtgctagcaatcagcgagattccgtgggcgtaggaccctccgagccaggtgtgggatatagtctcgtggtgcgccgtttcttaagccggtctgaaaagcgcaatattcgggtgggagtgacccgattttccaggtgcgaccgtcacccctttctttgactcggaaagggaactccctgaccccttgcgcttcccaggtgaggcaatgcctcgctctgcttcggctcgcgcacggtgcgcacacacactggcctgcgcccactgtctggcactccctagtgagatgaacccggtacctcagatggaaatgcagaaatcaccgtcttctgcgtcgctcacgctgggagctgtagaccggagctgttcctattcggccatcttggctcctcccctcaacattgctgttttttgtgaatttcttttggaaagttcttttgttgtgcaacaccatagaaattgtgtacctttttactaaagggctagatcttcttgattgtgcaccacacagaactaaaagatttattgaactccttacttatttaagtatatgaggatgcctttgttagtagtgggactgggattgccaggctctagaaagatttagggagtccaatgactgattggtcattgattagaccacagataaggaaattggtcaaataaaatttatgacatcttaaacattttctgattaattagggttttctagttaaactatcattaaagagaaaatccacattgatgcaattctttcttttaaaaatatatgtttattttcctgctgcaatagttagtgtaaagtgaacatgattaaatttttgttgtttagaatcttatgtcgcctctctcttaccattgtgagcatcattctaacattagtagtgtggttgtaggtgaatccacacttgtgttgagatttttattgatcctcaaacatacactgaaagttccttttttgggctagacctgtacttttccttctcaacagcttcttatttaagtcaagggaaaaaaattacaatttaagcgctgtcattaaaacatagaatatgaactgtttgacctgggaaggatctcaggaatgattcagactgtctccttcacacagcgtagtatttgcctaagagcactcagcaggtgagtgctttagcgggtgcagacctatgaggcctcatttaatgctctgtagaagaattccccaattcttattttcactattacctatgcagaactaaatccaattgctactaaatgccatcataaaactccatatgtgcttgcctgaacctgaaccctgatattattaacatacagacttccacagagcattactagggagtaacaagtcgtggaaaatggttagagaaacatattacagatatttatgggggagatgatcgtacttgcaagaagcatttcaagcctattgcattttctcaagtgatttatttataagttagctgtgactgaaaatactaatctacccatgtttcttttcagagcatttattttttactgactggagactgggtgccattattcgagtcaggaaagcagatggtggagaaatgacagttatccgaagtggcattgcttacatactgcatttgaaatcgtatgatgtcaacatccagactggtgagtgagattgcccagttttttttatttttttgtatgggtttatttatttgttacagtggctcctgttctctttaagtacttattacttaaaggtctagctcctggtagttttatattcttgtcgttcacataatctaagagtgtaagacttgaaatctctgttcaatgctgctagccttaaacatgttgtcaggaaaaacacattttgggacttttccatacctaaatggaatgttgtatttggcgggttgatttccaagaggaagctactttttagtattgggtctgaaaaatgttttgtcctgtttgttttccttcacaaatcaaacccgtgacctacctagtgaaaatgtacatgactgactccctcggggctttgcttttgcaggttctaacgcctgtaatcaacccacgcatcctaacggtgactgcagccacttctgcttcccggtgccaaatttccagcgagtgtgtgggtgcccttatggaatgaggctggcttccaatcacttgacatgcgagggggacccaaccaatgaaccacccacagagcagtgtggcttattttccttcccctgtaaaaatggcagatgtgtgcccaattactatctctgtgatggagtcgatgattgtcatgataacagtgatgagcaactatgtggcacacttagtaagtagctatgcactggcgatatttcctgggatgaatagagtagaggtgggctttaaagaaaataaataaaagcttgggctatttatatgggaaaaatatcttttagaatttcagattcttaacatgcactttgaaggcttttaggaagctaagcaagaaatttcattcataatgttatggatggtttctggccttgatttagactatcttcaacaatttttttccttgacattggctgtttggaccaatgcagtcattatgtcttggcaaactcctcaaaaagtcaaatcgaaataaactagatctgaccaggcaaggtggctcatgcctgtaatcggaggccgagacaggaggattgcttaagtccagaagtttgagaccagcctgggaaacatgacgaaatccggtctctacaaaaaatataaaatggcacatgtatacatatgtaactaacctgcacattgtgcacatgtaccctaaaacttaaagtataataataataaataaataaaaaagaaatagatgagctcagaaaaaaatatgtatataaaattacaaatagctgggactattacaaaatacaaaattacaaaatacaaaaaaaacaaaattacaagtagctaggactacaggcacatgccaccacacccagctaatttgtattttgtattttcacaaaatttgtaaaatacaaaaatttgtacttgggaggctgaggtgggagagttgtttgagctggggaggttgaggctgcagttagccaagactgtgccgtgtacttcagcctgtgcaacagagtgaagccctgcctcaaaaaaataagcaaacaaacaacaacaacaacaaaaaccaaaaataaagtagacctaacatttagcaaccgagagaatagtatcacagaataactacttgcaatcatagcctttggaaaatctcatgtgttatattccttttctcccatgttagagtaaaataaattaacaatgaaatggtggtcttaacctttatattcttcttttgacggtaatctagtctatatagtttggggcctaataaacactattgcagaaggcaaaagtattacattcaaattaaaaaaaagatagaggacagttgaaatctcagaaatctctatcaaggtgaagttaatactaataataacctttcttttggagagaaagaggagtgacagatttgcaagagtaaagtgctcacttgtacatttttctgaaattttttaaattttcatctttttgtgtattatcttcttgtttctaagagcacagcattttaccttaatattttatctatttgcacttttcatatgacatattttcaagctttctatagtctgaatttgaaattgtggttggaggaagtaacagcttgaaagttaaggatgagctttagagtgaatccaaccagagcgtgaatcataggcaggttcctaaatctctcaaagactcaatttccttatctgtaaaatgcagacaattatatgtactttatagtattcttgtgaggatttaaagagaacttatatgatgtgtgtgggtgcataacttagaaaaatgccttttctatgataaataccaaataaatgccagccaataatgatgttagtgatgatgacatcacttgatgaacatttctccttattatatacaatgcctccattaaaaaaggtgaactgagcctttataaggcaagaactcatttaaaaggctgtaaaaacaaatgtcttcatgaccagtttgttactattgtagataatacctgttcatcttcggcgttcacctgtggccatggggagtgcattcctgcacactggcgctgtgacaaacgcaacgactgtgtggatggcagtgatgagcacaactgccccacccacgcacctgcttcctgccttgacacccaatacacctgtgataatcaccagtgtatctcaaagaactgggtctgtgacacagacaatgattgtggggatggatctgatgaaaagaactgcagtaagttttgagctggtttcccttggttggtcagcctcgtaaatagacttcaacaaccaaatggccttgcattctttcctctaaggctcatgcaattttcattgtctctttagtacttctattccacttgtcaatctctgtgtcaataggttacaagaacaaaggcacgtgcctgcacatgggattcttagagtccacctacaaatattgagttctatggaagcaaagcaaggactgcctctgatgccaaacatttcaattcagataggaattgaaaaagtgaaaatccctcagctatctatttatatatttaaaacaatactaaaagtcatatagatatatccagacctttggctattgatgtttctttttcatttggtacaagcaaaaagacatcaaaataaagaggcacagaaaatttaaatttcctttgatcttatccacctgttttccatcttgccagttctgctttcctttagcttgttgttttatttcatgtcttcaataatagtttaagatggagcaaagttccctgggctaagttctagtcctggttgcctgactaggcaagtcactatcatttggaatagatgagctttaagatcccttctagctttcataccctataagtgtgtatttaatataatttcatgttgtgggtggggccagccactgcatccgactccaaggctatggtcttaacagtaaggtaggaccctggtttttagaattgttctgttcagacttttaaatccagttttgggggtctgtctacacactgttgctactaggcatgtgggtcatgctggttttgttgcctgattgggctccattgcttggctttggtctagagtcatggacttcatagtattcatgaaatgtagtccaagtccaagcacatgatgctcactttctgaatgtggtctattttccaaggtgtaatcacagtttctgactctgccctgtaatctttttattctcaattctaaaacctatcctagttttgagttcttttgcttagctgactttgatagtgtggctgattcaaaagaattttgaacccatgtacaattgagataacttctgtagctatttagccatttttagtttggctctggtacttgttgcacaggaaataaacttgttggttttgttttcggatgacattagattcgacagagacatgccaacctagtcagtttaattgccccaatcatcgatgtattgacctatcgtttgtctgtgatggtgacaaggattgtgttgatggatctgatgaggttggttgtggtaagtgcattgccttcttttttattcacaatgtttatttagaaaaatctcagtgttaacacatggacacagggaggggaacatcacacaccggggcctgttggggggtggggagctagagaagggatggcattaggagaaatacctaatgtagatgatgggttgatgggtgcagcaaaccaccatggcacgtgtatacctatgtaacaaacctgcatgttctgcatatgtactccagaacttaaagtataacaacaaaaaagaaaaatctcagtgtttagtcattttagccctgagctaatttctaatgcttttctctttcattcttagtattaaactgtactgcttctcaattcaagtgtgccagtggggataaatgtattggcgtcacaaatcgttgtgatggtgtttttgattgcagtgacaactcggatgaagcaggctgtcgtaagtaacacatacccagaatgtttcagacaaaggggtcatttcatttttgccagtattgatattgatattgccacacattttccctaactcagacaaactgggggaaagtatcctcaaaggaatgtggtattgaacatacagtaaaattgagtagacattgccatataatgtgtaattaacaaatcaagtggttgtataaatggacacttcaaatagtctcttagatgggctaaatatttcttagatatttttgttttcacttttagtttttcttaggacttcccactttagtaggtttaaacttttgaggctctactccatataaagatattttactggtttcttttaagtttcagtagagaagtcatatcatggtgtagaaatggtatggagctgtgtttagtattgactctgatgaattcattctttgtgctattatgtgttgaatatctgctaagatgttatctatggagattatagaaggcaagagacaattaagcaagatagacagttacaagggtcttagaaatggcacagataaaattctatggaggttcagagaaaagaaatttcttctagttggaggattcaagtaggacttcatacagtataattctgatggatctataatcttcacagactggaaacctatactcacatgatttgttatttgcccactttttgttttaaatggattttagacttgcaaaaactcatcagtgagttgatcatttgtttgaacaatggtgttttagaccaaaaaagtaagttttcatgaattctcctcctgcgtcagaaaggtagtgtgtaaagccatggattaaaaagaaaagttaaataaaatgcttatatactttatagtttgcacaacatctagaaattactaatcactaattttcctgtttcacattaaaaacataaaattctgtgatgagctgaggttaaactgtcaattgccgctggcttgctgttgccttgtgagatccctggtagagagttttggtttacccttgtcaaatagggaagcagttcttacgtatctctccaggattgcttgatgaatagtggaaagtttgcaaagaactgagtatttaccatcatctttagttagtgtgtgatggtttcattaggtatagttcatctgagggaaaataataacacccaaacatgatatgaaacacatgaagttcaaagtaatcatagctatttaagctctattgtaatgttctggtgattctttcatagaaagatagataaactttattattgaatctgcaattggaagtacattaaaaacacaggaaaaggaaacaggatgttcttttgacacaggtactcatctgctagtcagcagttgtgcgttctgtacttcgtttgttgtcagagccactagctgccacaaagaaatatttctatgtactagagtgtgggagaagactctatatcatttagccttaaatattaatttggtcatagttgttactataaacctactattggatccaaaatcatttcctctgagtctagactataaaagggatcacaaattacattcacaagccgatttaccccatgttttccttctagcaaccaggcctcctggtatgtgccactcagatgaatttcagtgccaagaagatggtatctgcatcccgaacttctgggaatgtgatgggcatccagactgcctctatggatctgatgagcacaatgcctgtgtccccaagacttgcccttcatcatatttccactgtgacaacggaaactgcatccacagggcatggctctgtgatcgggacaatgactgcggggatatgagtgatgagaaggactgccctactcagccctttcgctgtcctagttggcaatggcagtgtcttggccataacatctgtgtgaatctgagtgtagtgtgtgatggcatctttgactgccccaatgggacagatgagtccccactttgcagtaagtttcctgaccacagtttactggccataaactcattctgaacagtagcctggtgtgcatcaccattgtcacagtcactgtgtagctttgtaggaaggatttcagttcctctatgagttcacatctgtgtagggggtaaccataattgaattcaaatacatcaccattggataattttctgattaaatcctttgtacttggttatgtgtttttacttctttttatgtctttgtttcaaaaaatgagactaaattgaggccattagattgtcaaattaaatttggttctgttggtaatgtgctcattaatttttctaactttaatattttctaatttcaatcagaacttatcacaaaaaaatgaagtccagggatttgtgttgctgtgattaaagtgctgtgattggcatgtaatcctaattactgtcatttctttctttcctctttaatcaatgctcactctcagatgaaccccagccaggtatgattgtgaagtatttcagattcttatgatttcatatgtgttgtgtttgttctgaaaatgtcctgattatattaacttacttccctttctaacgcatgttctgtgttatgactcttacaaatatgttagagtacacatggaaatagaaggcatttgcatccccaggcatgtgaactgtcttagggtggctttaggcattttcattttggccctgaaagtaaggcatgacgatatgttaccggatctgtgtactctaatatttcaatgacctttcccctttgatttgttcacttcatagattttctggtcttttctcttaaatgtttgtctatcttccatttctgtatagatagtagaatttcagaggaagaaaacgagaaacaattttaagtgtctttgcatgctctatcaatgacacttttcttccttgatgtcaacaatattttcccaagggttctcattgcattaaatggagttatactattgggttgtagtgaagaaggtgatcatactccaatggatatgaaggatggtaaatcctcagacaaattagagcaaaccctgaacagcctgtggaactcacccaagtgcatgctgcacttagctcttgtctgggcatcatattgaaggtggcatgagactgcataataaatattgcataagagtgaatcaaagaagcaaagattcttgattttcttttttcattattctctttcttttttctagatgggaacagctgctcagatttcaatggtggttgtactcacgagtgtgttcaagagccctttggggctaaatgcctatgtccattgggattcttacttgccaatgattctaagacctgtgaagacatagatgaatgtgatattctaggctcttgtagccagcactgttacaatatgagaggttctttccggtgctcgtgtgatacaggctacatgttagaaagtgatgggaggacttgcaaagttacaggtaattgctgaactaacccgagccagtttatcagcacatcccagagcttaaaatcaaatggcacatgtaggtatttgacaatgttgattaggagttagatcgacttgaatcctggaaagattatgcaatctctttaaacctcaattttttgtgaggattaaatggggtaatacacattaaaatcctggtgtattttggaaaatagaggttaaaacatatacaagtcaatgatttttaaagtatttaaaataataccaaatggcttttatataatttaaaatgagttctatactatatttaagcatctttatataatgcttaattgaattcaaccagtattaattcaatttctgctataagaaagtgctttttactatgtattaggatattgatttgaccactttcaaagtgaccaaatagaggaagctaaaacaaaaacagaaagtttctttcttttacatgtagtaggagtctggatgtcagagagtccagggcatggggtctgctctgttatcctcatcatgtggcttacatcaagggttccaatgctccaggttttagcttctcttagaaagtaggaaggggaaagagaaagtggagggcaagcagcttcctttttagaatgtgacctgagatttgattcgtaatttctactcacatcctattggtcagaacttagtcatgtggtcactccaaacttcagtggagggagagaaatgtctctggctggagagtctgtgccaagctaaaacttggcatgctttattactaaaaagaaaaagaagagagggggtgttgggagaattagaactctctaccatagctgagggcctcagaaaacagaaatatttaagacatgattcctgctgtccagaagcctacaacctattaaatagtaaggaagataaccaaagtacaaaaataaatacagtaaaaggaagaatgtaagcatagtttactctagactagtatttagaaacacagttaaatataacccaagaaagagtctattttaagtactcatgaaaaccagctaactattaaggttaagaatgaagtgattaaaatcattcatatggggcttcctcccctccccaccaacttactatagtttggaattacaccttctttctgttaccaaaagtattgaatcaaaagttttaaagagttgttttgtgttttctcccagtatcattgacatttttgcatttttttcttgaacagcatctgagagtctgctgttacttgtggcaagtcagaacaaaattattgccgacagtgtcacctcccaggtccacaatatctattcattggtcgagaatggttcttacattgtagctgttgattttgattcaattagtggtcgtatcttttggtctgatgcaactcagggtaaaacctggagtgcgtttcaaaatggaacggacagaagagtggtaagtacatttctgttgacctttggcctggctagttcctctgtcttgggtctgtttgctgttattcaccagtgagagaaggccctacctcatctgggtagctctcatggtaccttctgggccacatcatacccaagagacttgcgtgttcataactacgaatttatggctgttttagataggagggtggcctctgaatgcagatgtgtgattctgaattccaggtcaggtgatgcagagacctcacaatgtctttacggttccttttgcagtcttttcttgtggatgagagcagaggaaagtgcaggaaagttaaggggttgcttttcttagctttaatttagtgatatttctcaatccatctcccagaatttcagtttcttggctcctgatagttacatttcctctgcctcttacaactttattttgtaattcttggtccttaattaatagagatattattcgttgcatgcaaacactataacattttgtaatgttgccaactaagcaaatggatagagctttttcttaattgcaaaaacttttgaaaccaaaacgaaactatgcactaaccaaacaatgaagtcatcttagaatgttcagtgtgacaaaatcttgtatacttttctcagaaaaccctgctgttgatttggtggttagctacatgaggagacaaaattttctaatccccacaagtaattataggacaagttagatggtttaatctagatttttatataatatccatgtttgcattcatttatttgctctagaattcactctttattcacttttgtctttaggtatttgacagtagcatcatcttgactgaaactattgcaatagattgggtaggtcgtaatctttactggacagactatgctctggaaacaattgaagtctccaaaattgatgggagccacaggactgtgctgattagtaaaaacctaacaaatccaagaggactagcattagatcccagaatgaagtaagacttttttttaaaattatgttgccttgacatggttatgatgagggaaaaacaacagtaacatgatgtagctgatatgcatgttgctgatatgcaaaatttaaaatgatcccttgtttaaacatggtaggtgtccaactgggtgttgctatctctccttcatctgaatcatcctcttcataaagtacataagagcaattgattgtttactttattttaagagcacattgatttattagcttggcaatacaatttttgaaatgtcatataattaaaaattaagtttctaattactgcatgcagtaatagtccatagaggggccagtttgatgtaactttgataactcatgattatacaacaaaaaagctggatttttctgcttcagttttatgttgtttattagagctcccttttaagtcatataaggaaggcagtttttgcctgctgatcctgaagggaagatagagaaattctcccatgtgtttggaaatctttgaggatttctttccctgaatttacttatattttataacttagattcttttctgcaggatggtaaattaggcaagttatgttcaatgtgatgttgaattcctagatattgtaaagtattacacaccactgaaatttatgatgaattcctgatgaagaataaattgatttccttatctaaaaacatgacagggtagacaaacaaggacagatggatttttctagatcaactatttgtggattataaacaaacatgaattggcattgagacatttcaatgtcataatgtactacattatgacattatgtattacatgttttatgaacattataaaaatacccagatgggttgtgattgtgttatgacagttttactttgtgacacttagaggaaacaataaactctgtgaatatattctgaaccagagatgatttattttaagcagggcataaacaggatgttgtattatttaaaatgacagttatttttaatatttaaatacgtcccctccaattggtaactcatttcctttcccagtgagcatctactgttctggtctgactggggccaccaccctcgcatcgagcgagccagcatggacggcagcatgcgcactgtcattgtccaggacaagatcttctggccctgcggcttaactattgactaccccaacagactgctctacttcatggactcctatcttgattacatggacttttgtgattataatggacaccatcggagacaggtgatagccagtgatttggtaagttggtggtgaggaaaaccaaattaaaactacagtcgtggataggtagaaatcagacgagtatcagaaaagctaagaaattaatttttgtgtcatagacattgtcagatcaatccaggaaataccagcaacagtgagaggcagtctatcccatatgactaactggaaaatgaatattttcattccagttcatggtcagcttgtgccatatccaggaaggatttttatagctcgtgtgatttagttgagctgcagatgtgaatctgttgcttctatacctttaaaaattgtgtcaggtggccgggcgcggtggctcacgcctgtgatcccagcactttgggaggccgaggtgggtggatcatctgaggtcaggagtttgagaccagcctggccaacatggtgaaacctcatctctactaaaaacacaaaaattagccagtgtggtagcacacacctatagtctcagctattcgggaagctgagacaggaaaattgcttgaacccgggaagcagaggttgcagtgagctgagattgcctcactgcactccagcctaggtgacagagtgagactccatctcaaaaaaaaaaaaaatttttttcaagcaaaaatttataacttaacttggccaggcacattgtctcacatctgtaatcctagcactttgggaggctgaggttggtggatcgcttgagcccaggagttcaagaccagcctgggtaacatggcaaaaccccatttctacaaaaaaatacaaaaattagctgggcatgggggtgtttgcctatagtcccaactacttgggaggctgaggtgggaggattgcctgaacccagggaggtcaaggctgtagtgagctgtgattgtgccactgcactccagcctgggtgacaaagtgagaccctgttttcaaaaaaaaaaaaaacaaaaattaactagatttatatttctcagtcttgttcttcacataacattttttattctataaattctgttgaatttattttcacaagttaaatgggaaaataaagaaaatagatattttatcaaagagctgttattgacccccattaaaaataggaatgcttttacactgttggtgggagtgtaaattagttcaaccattgtggaagatagtgtggcaattcctcagggatctagaaccagaaataccatttgacccagcaatcccattactgggtatatacccaaaggaatataaatcattctactataaagacacatgcactcatatgttattgcagcactatttacaatagcaaagacttggaactaacacaaatgcccattaatgatagacatatacatcatggactactatgcagccataaaaaagaatgagttcatgtcctttgcagggatatggatgaagctggaaaccatcattttcagcaaactaacacaagaacagaaaaccaaacacttcatgttgtcactcataagtgagagttgaacaatgagaacacatggacacagggaggggaacatcacacaccggggcctgtcagtgggtgggggcaaggggagggagagcattaggacaaatatctaatgcatgtgagggttaaaacctagatgatgggttgatgggtgcagcaaaccaccatggcacatgtatacctatgtaacaaacctgcacgttctgcacatgtatcccagaacttaaagtaaaataaaaaataaaaaattaaaaacaatttaaaaaagagaaaaaattgctattgtatagttgctgtgacttgaaggaaagatgcatctaaactataacagattgatgtgaatcagtgagtggcagcacaagaccgtggaaatagccggcacaagtgtgctgatggtggagtgaaggctggggcgtgggagtgggagatgaggagtctctaagctctctagttccatctaacttttaactagtaggtgatccggatacatcaccttgctttttgtgcttcagttttgttttcatttgtaaaatagatgcccagtgtaattaccaaggcaaacataaagagtaaatggcacgtgtatgtgaaaggctcttgaatggtttagtgggatataggacgaattgtgtattttttgccgctcttttgcacaatgacttccttgtgtttttattaaataatgacatgttaaaggaaaccgtcttcttgagcagatatcctctttgactcagtgcaccttggctttgatttttggatgaggtctcactgttctcttctgcctcacagattatacggcacccctatgccctaactctctttgaagactctgtgtactggactgaccgtgctactcgtcgggttatgcgagccaacaagtggcatggagggaaccagtcagttgtaatgtataatattcaatggccccttgggattgttgcggttcatccttcgaaacaaccaaattgtgagtgatacagagaaacatcctgcctgggagtagcttgaaaaacactgaccctgggaatgctaaatgcacactgttacagacccatttgtttggacaatacattttccttttctctttacaaaccaccccactatatactttccctagtcctgacattgccattacttttatttaccatggaaatttcaaacctaggatataataacagcacatctgaattatatcatttcagcatttggctgctacctctttgaccctcacatgagtctccgtttcctcagctgacaaatggagtacagaccagatagtgccttcgatcctcttaccgctaccactctgattgaaagcagcttacttttaggactagtttattatggcaccactgccttctaggtgctctgctgtagccagcacgagttgtcctaaagtgcatggtatgggtgtctaggtgaaagacttggcatccgtactgttctttctggtgggagagggagataagtcacttaatcttcacttaatcctctctcctcaaaactctccaattgtttctcacacccttcagcatgtggctgctgctatttccctgctctcttctcccactcgctgttgccacattggatttcattatggtccaaaagcacagcaggcgactcctgcctctcagcttctgcgctagctcttccctctacctggaacatctctcttccagatctctgcatgagttgcttcgcgtgctatttaggattctacccaaatgtcactttctcagagaggccctcattgaccgctctacctaaaatagccaccccctcataattcttttgctctttaccctcatgttctgaaacctctctctctctctctgagtttagttgtttctttttgctcgaatatatactccacttttatagcgtccccagtgcttagaatggtgtttggtttacagtgaatacctaccatttttctggtgaatgaatggattaataatctattaataacatggtatgtgtaataaaaatgtataggatctaggaaacatcctgtgtgtggggaccacacagaatcctgattttcaaggtgcagagacacacagagatatcatcagtagaaaaataaaagattattatctaaccaaaatctggaaaactctaggtaaactacaaggtcacacatcaaacacacaactttttttttttttaatgcaaaaagatctcttttaggtcaggtaaggagacagattatttggcatcatatttctattacaagttccagattactcagtggctgtttgttcgtaatccagttatagactggattgatctgtaaccttgagtcattctcctctctcgtgtctcttatgaattctaagttgaaagcctgatgctagggaagttgaaagtgtgagtagttcagtgaaaacaaaacaaaagaaaacaacagaggtaacaacgtacttaagcccccctgtactggggcctctggaaggacactaagagcatgactctgttttgattttaatgtggaggttttccacttactggtgctttcttctctttctcatgcagccgtgaatccatgtgccttttcccgctgcagccatctctgcctgctttcctcacaggggcctcatttttactcctgtgtttgtccttcaggatggagtctgtctcctgatctcctgaattgcttgagaggtatagtatgctccttatgtgagctctgaagatggagctggtcatagtttgtgccaagcagtggaaactctaaaaccaattgcgactgaacatgtgctgtgtcctttgattcctcaggtgtctgcagaatgatgtgtgttgtatggggtgatgtcactgtgtgccttggttgtaatacagtttctgtatatggaactaatgttatctgtgcatgtaattgaacaatctgtaacctcatattttctctcacctgggtacagttagacttctctgacaagccatgataatgggaagttccaaattcttcacctaagaagtaaacattctcaacgtttgtgtacagcttcattttttatgtccattgtctctttctccctcttttttttttcttttttctttctttcttttttttttctttctgagacagggtcttgctctgatgcccagactgtagtgcaatggcgtaatcatagctcactgtagcctccactttccgggcccctgtgattctcccacctcagcctcctgagtagatgagactataggtgcacgccaccacacccggctaatttttgtattttttgtagagaccgggttttgccatgttgcccaggctggtctccaagttctgccctcaggccatccacttgccttagcctcccaaagtgctgggattacagacgtggaccactgcacctggctccattgtctcatttttattcttataaccaatagttaatgagtgttctagcctgggtcttctgactccaatttcagtactgttactattaccatctgatactttaagaaggagaattgtgttggtatgagatattacaagtgactgagcaatttaatatttatctcatcctagagatattttattgggtcgattgaagagtgtgtggaggattataccaagtacttaagggagtaagaaaagaaggaaaagttgcatccagttcacaaaagagatttcttctggagtgtgtacttgtatataatacacttaaaaatataattccttattgcttaaaaatctaagaagttactctaaacccaagttccctttcgtttctcagtgaagagaactgaatgaatatattttgatactgatgaaaattgctgtagacaagttcaacttaaatgtttaatgatcacatattcctaaattaagagataatagagtcctaatctagaaggaaatttagtcctaatctagaatggaaaatatatactgaattcaggaaacttttagtgtttagatattatgcagatgtaggcttactgaaaatcaaattccatcagcatgtaatattgtgcaatgatactttcatgatgaaagattttaattattggtaattctcacagagggactggcacttgccatttttcctcagagacttattatgtacctaatcctcgttgacattgtttaatttagtgtgttcctagagtctttcaggagaagattaaactgggctgtagacatttcggatacaaagcattctttcagcacacaaagactgttgaattgcacattgggggttggtgtaatcaatattactctctgatgatgattgataagtgttaattttaaatagtgccttttgttgtttcacaaataattccactagtggttttctcatgggttgactttaccgaagtggaactttttaagtatttcccagtaggtttcagagcaccagctgagtaactgattgccaatatatgttaaatgaaaaaaggtttccacatttttttttccccaacaagaagtttagaaaacttgttaacatttataggtggaaacattttacttgatttgattgttgaatagcttttcaactagtgtttactaagaggctggaatatatgtagaagtgcttctgtgatgctgttaagtaaaagaagcagatattgcacaatattggccttgtaaaaacatgcattaaaaaacacacaagtttctggaagcaaaaacacacaagtgccaatagtggttacagttggataggggaattatgagatggttctacttatttctaattttatgttataatgagtgctttctctgtatgagactttttaaattctttagaaaatatattccccacaatgccaaaaccaaatgaacaaacaaaactcaagccaaacatcacctcagcacccctaaaattactccaaatacaaatagacttctgactcggtctcaggggcacaaggcacttgcttcagtgattttgtgcaagataagagaacactccttgtccttgctccagggaaggctgcagtgctgatcagcttgtgcagggtatgacttaaggaggacctaggtttgggggtcatatatattgtcgttcaattacaacactgagttctcattcctgactatagtgtcttcatgactctgctgacactaacattaatgggattatgacatggaaaatagaaatgaagagatgatctttaacttcaaaagacagagacacactgacctacttaaccgtcaccacctcctgaattcctttccatccaaccctagatgattctgtgcctaccccttcatgccattgtcataattgtaagggctcatatacttggtcttgccctctagatgctgcgttccttgaggataaagcctctacctggtctgtagatgtatgcttattgcctgtggcacttcgtggtacatggtggcactcagtaaatgttgagtgaatgacaagctctccaatatccatttttgttacttccccagtcctctgatttttacccgtttgctccgtagaaatgtgtgcagtgttgtgaagtcacttctttttgctttcccatatagcacttttcaggcatctccctgcgccacctgttgtcttactggccagttcctttctattactcccctggcatcatcccccaccatgatgctcacagtttcagccagcgcagcattgcaggagatcctgttctctggtccattgcttgcaaatgttcattggtggtaaacgttctcagtacatcagcagttatcagataaagggcttgagacatgatccccaggaagcagtagaagcgggtggtgcttaagggaagagcaccatggaagagtcaagaaggcccatgcataatggatgagatatgcaaagtttttaggccctaaacaatgctttggttgagaattattccaattaagcaaagggagatgacccattcaaaagggcaggatcagatcttacgtaagtgagtaaaaatttaaagtcccccataaaactgggacagagatagtttctactgagccagtgaacattaataacagataatcaataaataattaaatatcatctcaatataatttcttggtacagctgaaactcataatctagcatttttttttttttttttactgttgcagttaaaccaaatgaaatgagtggtaatttgatactcaagaaatagtacctggcctgcggtatttgcagtgtagtgatgaaaaacgtagattttggagtccaggagtcctggttgtgtgacctcgtttaaattgcttgatttctttgtgtcttatttgcaaattgagggaggacctatctaacaaacaagattaggaaacttgagggagataaattaagggaaatacttacctgatgcatgcagtatggcgcatattctcaatcaatgagaagcgatttttattgcaattgcagttgttcagaagagaggcaatgtggagcagctgagagaagaagggcctggaagtgaatgagccagggtccatctcctattactgtttcctgcagaagtcacagagctcctgcaaatctcatttgctccagctgaaaacaactttgcaggcttgttgtggaagactctacattgtagtacttgaaaaatgtaaagcattaatagttgcgaaatttacattagactaaatttaaatttgtcctaggttaataaagactgggttatttctcagtaatagaaatgataggaacaagaaaaagctaatgagatgtgaaaataagtaaagaaaaaatgaccaagtcatcctgctgaagatggaaagcttcccggattataaaaataatgaaaacatcatttttagcttatgaaagttgtgtaatgattaatcatttcatactttgtcttaatatgtgatatatcttatacatatatcttaacccaaaacttagattcaaaagttttccttttctcagagaggaattttaaaaccccactcttgatggggatcaggataaagattaaattatttttgaaaaaggaacttttattatctattaaggagataagtgaactgatagtttaagatattatgggaatgtttaaattacaatgtgtagacagttttgagaactttggaagatactgtttacttattcacttatacattcatccattaatgcagtcatatggtcatccatttagttatcaaacatttattgggcaactattttatgccaggctctgagtaccaggccctgggacacaataatgagcaaatcagacacagtcattgacctttgggagttaaaatcttatagggaagagagacactagtcaagtaacaactgataggattatacattggatttatttattaaagtctcaataaatactaggcaacactttgtagtgttgttttatttttggaacattcttaaaactagtaagctgcctttcacaagaatagtctcaatgatttttttcactttttttttttcaaaactcaactctcctttccctgagatcagtgtgagtgaggtttgtctgtgtgtagaagtggaagaacttcctgtctgtgaggtttagcaaacatgggtggtttattagtgtaagtaaggacttaatgaagagtaagataaataccaacctgccttgaaaaagtccagacagcgttgtatgtggggttggaggtcttgtggtccagcagcccactgaaaccctgggaaaggcccatgcttgtctgatgaagtacattatatttattgctgcaatgctgcaatgtcattttagcccatatgatggtaacaggctattgccttccattactctaaatgtctgggaatagtgggatatgattttgactgatattcttctattttcacagatgatcaacctttcttaataactgtaaggcaacatataatttttggaatctcccttaatcctgaggtgaagagcaatgatgctatggtccccatagcagggatacagaatggtttagatgttgaatttgatgatgctgagcaatacatctattgggttgaaaatccagtaagttttgaataacattcaaagtatataatttattcttgaagagcctgcctgcactgatgttttcttataagcaaacttttgtcatgtgagtaaaagggaaacaatgtggaaataaatttatccctaagttttttgattcaatgaggggtatatatgtgagcttggcctggagcaaaaatcataacactctttagcttcagaataagaaacaaatttaagctattgtgtattatttactcattcagcaagtattttccagaagtgcctatgatttgccctgcactgaattacctgcttctaaccacagaatacatgccaagaagcagcagtcacaatgcttgcccctagaggagtcttaagctagtagaaaatattcgacgaatataaaaatgatcaaaactcaagataaaagtagtagctccctaagggaatttagtgaaagcatttgatgtggtgctggggccttcctttagaatcctttagaatatttgcctctagggtaagaatgaacacttctccagttctcttcctcagaggtcattttcttcagccttcagggaaaaaacctgtaagaatagggaaagagcaagaagactataaaggaggaagagaagaaaaatctttgtgtttcatgtttgtcacctatatacaaaatatactcctggtcttctgatccacatctgtgacttgggtttttctcatgacttgtatgcttgtggtagttaagaactatctctgtagccagtactggagatagcctgaatggtaagccttgtgtattcctgtgacacactgaaaaatcgtttgaagcctacccagtggtgctgaacctttgtttgcctttcctctgagtgtaaggactgttcaagaaatacagcagctggcagtagccacagtgaagaaagggttcttttgtaggagccatggccttggaactgctcacctccccttgtctttctttccagggtgaaattcacagagtgaagacagatggcaccaacaggacagtatttgcttctatatctatggtggggccttctatgaacctggccttagattggatttcaagaaacctttattctaccaatcctagaactcagtcaatcgaggtaatgattccataatactacttacacaaacattggatttagattgatgtaaactctagtctcaggaatagatctcacgtggattttggaatcatttttaagcaaaaagaaaaagggaaaagatattagtgttaactatcaaagtctctgaagtgaaagaggaaaaccaccttaaaattttttttaaatttatttttatttatttatttattttttttttagacaaagtctcactctgtcgcccaggctggagtgcagtggcaagaccttggctcactgcaacctctggctcctgggttcaagcaattctcctgtctcagccacccgagtagctgggattacaggcgtgcaccaccaagcctagttaattttttgtatttttagtagagacggggtttcaccatgttggccaggctggtcttgaacacctgacctcaagtgatccacccgccttgacctcccaaagtgttgggattataggcatgagccaccacgcctggctggcaaaaataaattatttgagctttctattgctctattttgtttcctcctaattatcaatactaccttgttgctataaaagtgttttaggtaatttacaaaataatatataagaagataaataaaagttgcataaggaattcaacataaagggaagattatggtaagcagagaattttactatgtttcctcatctaatcttcaatgctatttcagttctcaaccaaatttatagtttgcctctgttcttagatggaaatctttctatggctccagtacagtttttctaacagcaaaacagaaagtagaaacttgattctaattcctttgatactctcttcttcaagataagtgttctttttactctaattcccagaagaaattctagatgaggcacaggtatgaaatcacatgaagtaagtcagaggtaacttgactagtgttggtttgctccactctgagagaagggtaaaacatggaagggattattaattcacaataattttgaaagtgaaacttcccaaaacaaggagaagtttttggagggggatagttagcagagccctgacaatccactgctttaggtgggcaccagctggcaagacggtttttctctggagcattcagaaagatactgaagatgagcaaggcgcacagcagcctgctggctaatttagagcacctatctatactaaaaagcactctctgtagactaagaacacagcctatgtagagttcggtactatctgaggtttcatgcatcccttggtgatcttggaatgtatcccccatggatgagtgcagatgactgtttttatttctgccaaatgaagaaatagggaaaaggtgtcccaggcagagaaaagagctctcactggaacagcgcttgagtttacaaagatctttcactagcatctaatttaatcctcacaacattcctgagggcaggcagttctggtagccatttgtgatgagagggaaatttgcagtgtgcacaagtatctcaagccaggtagaattatcaggtgttaacatgaagggccccttggaggctcctctggttcaaactcttttttttatttttatttttttacatcagaaaccaaggcccacagaagctaagaagatgtcttaaatggtcagcttcactgctctaattcctgagcagtattctctctttgcacttttataaactacaactccggcaatccagactggtttaaccctctttgacagtggcagaaaatatttttcatgatttcaactaagactatcatcctcccattaaacaggcaacatctactgcctaagacccttactaccaaactcacatctctctaaagtccacccagtgcaaagctgtcttaattccaaatggcaattaatatgctcttattttatctctttgtctcttgattagtaaatggggttctcttcttttaaactgatagttttccaaaagcagggaacgtgtctttcccattagtgttaggtacaatgcagtagtggccagttggagaataactgagcgtgcatgtgtgtatggattggtaaggccactttaaccacatgaaccaaaagtttctaattatgccctgatgcagtgtggtacagaggaaagatattttgatttggagtccaaagacctggctttgagtctgggttgcttgctcattttattcattcatttaatgagcactaggaaatgctttctatggatcagttgatcctggatatcctaagatgaataaacattttttttctgtctttaagtagctcacatatctgtgagatggatacataaacaaatacctgtgctccagtgtcataagtgtgataaggccggtgaatataaagtgctagtgattggaggcagaggtataagtgaggggagagagcatgcagatttcccattcatggttacttgtgagctgagtcttgaaagatgactaatacatccttgcttatcggagggtttcactttccgaggtttcagttacctgcagtggcctgagaatatgtgagtacagcacaataagatatttaaaagggaggagagagagagagaccacattcacataattgttattacagtatatttttataattgttctattttcagattatggttaatctcttaccatgtctaatttataaattaaactttgtcataggtgtgtatatgtaggaaaaaatatagtatatatagcattcagtactatctgaggtttcaggcatccattggtgatcttggaatttgtcccccatggatgagggggatgactgtttttatttctgccaaatgaagacgtagggaaaaggtgtcccaggagagaaaaacagttgaataaagaccctgaaacatggaaatgcattttatgactggggacaacactgcattttctccactcatgagctattcgaccttggacaaattacttaacttctctgagcctgttttctcatctgtacagtggagtttatggctgaggaagtaaaagtacttcataacactgaggtatcctgtaaatacagagcgctgtttccctcaaatgatcaatatttttagaaaatccatgaaagacctgtgagaataatgatccaagggcaaactgcccttttaatggtttaactggtgtttccccttaggtcatttaaattgtaagtaagtcttccaggtgattgttggattaattaagaaaataggaatcgtattcactttctgtttacctgtataatattccttcctgcctaagagtagttcgtgtttaactccaacttgaaaataagagaaacattgaagaaactattatccactaggggtagctgtgttcccatccactaaaagaaattttatagctgaattttgtagtgaagcctacagaatggccgtgtgagagagagctctatatattccagaaagcaagaaaaggaactgtgaaccaaagagatccttagtcttaggaaaaggagagagattgtagcagaaagaggcaaaccgagaaaagaaaagctaccttagtccaagcaagagtgaaagataccagacaataggcagagaaaaaaatttagagaaaagaatgagggaaagaaggatatatgtgtgtgtgtgtgtatgtgtgcgtgtgaatgcgtgcacacacgtgcacacgcatgtatgagagacagagaaacacaaataatctatttgtattgaaaagcaattttatagaaaaaccttaatgcaaaaatcaacagacattttctaatttcttactaattgtctgttagactgtcttaggtacgtattaaaatagcttcattgctgtaagaaacttctttctagtccaataaactatatttctatgtgctgtatcagggccctgttaacactgtgattataacagtaataatcacagacagccttgggaaagccactaaacctctgtaggcctctttttctccatctgtattgagaaaaataatgggatctacctcacagaattgtttatgaggatcgaatacaataatgcttgctctaatacctcatatatagtaagtgaccaacagatggaccaattaaacaatagaagtttattgaacatagttgtgctgggtggtgtgctgctttacctgtattatctcttagtcccgtaaggtctacgcagaccttccatatttgactgataaagttcaaagaggtgaatttatttgcctcagattgtacagtcaggacctggcagggcagagatttcagctcatgtgtttcagtttagtttgttgacttggaacagaattcactgtacctctgagtaaatttggactattttgatcaactgtgttggcagtaactggccaccgagtgccttggtggggtgcaggaaagctgtggggttctcatttgtcttccagagatttctcttagctctcctgaaggatttttgcagtttctttaggcagtggctctgtatgttttcccaactgaatcttccttttatccataaaaatgttccctcctgaaattttaggtgagttggaagtaggaacttgggaggtgattttgctgctcttactctcattttctattgagctaatttcctcatttccctgaagtgcaatatagattatctgaatctcatgcaaatcctctctcatccatccctaatcgtgctttggaatttgttttgtacataagttctccttcatctcagtttcctttggttccccttatgaaagtcagttctaataagtgattttatgctataggttttgacactccacggagatatcagatacagaaaaacattgattgccaatgatgggacagctcttggagttggctttccaattggcataactgttgatcctgctcgtgggtgagtattcataaatggcacgtgtcttccatgcagcattgttcttgttaatgtcagggtctgacaaaatggaagatttcaaatttaggacatcttctgatttcatatgtcaacatttgaaaaataatagatctcagtgagaaagagaaatagctctgacctatatttaatgtgcaggatattgtttgtattttgtcctatggtcttcaaatgaacaacactggatttaaaattaattccaaacaagcaagaattttaggaattttaaaatagcattataagaattgacaatatattctgactttgaaaggacacggaaagctctaagggattatgtaacatttgcaatagagcttgcaggatgagaagccttctagtaggtggagaatgggttgcaaccaggcagtgactcttgaggccaagggatccatgaaggcacagaagtatggcggcacttagcaggattgtggggagagccggaaccagaggcttagagtagggagctgttgaccacatgggagatacaacagataaggtcatttggggacaaatcaaggagggcctttaatatcatgctaagaagttgaactttattcttttgagtgataaggagcaagtagggattttttttaaaaaatttcaacttttattttagttatagggggcacatgtgcaggtttgttacatgggtatattgtacccagatagtgagcatagtacccaatagttagtttttcaacccatgccctcctcccttcctcccctctctagtagtccacagtgtctgttgttcccatgtgtatgtccatgtgtgctcaatgtttagctcccacttataagtcagaacatgtggtatttggttttctcttcctagcaaggaatcctgaggaagggagtgaaagaaccaaatttgtgttttagaaaaattggtcaggattgatgtggagagaggccagggccagggagaccagttaggagaaaatggtcttaatggatgtaggctggagtcctccggtctgtttgattggctatttcattctgttgatctactataccatattataaaccagaataacaaattgtaaaatatgaacactgattttttttttaaagagattgtagcatcattccaagtggattttggcttaatgtttgaaagttatcagattcttaggcctagaagggcactgaagaagtaatttgtattagcgctctgtttcaaataaggatgacatggaaaccaaatccaatttttaaagggcacaagaagcaaacattctattctgtgcctgctggcttgtactagttttcagttattctttctagaagaaggactgtcttaggttcgaaattctacttttgaaactcaggctcactcattatttgtttttcgtttatcagacatttctgcattgtgtacctttgttgggtggtgtgttagttaagatagctaactgttgaagcaaataaactcctaaatatgtaatggctcaaagaaaatagaaatttttttgtcttttatatgggcagtggggtttgggcagaagatgggaggaagctctactctacgtagtcattcaggacccaggctgatggatgctctgccatcttcagtaggaggcttcctaggtcattctgagtatcaagatctttcgagcagtaaaggaaagaacgttcagaaatttgctgggaggtttttatgagccaggcctacaagtagtgcacgccacttctgctcacactccttaagctagaattgggtcacatggccacagctaactgcacggaaggacatgcagtccacctatttacccagagagaagaggaagacattaattttggcaagtggaggcagtctctttcatggggccatggtggggagttcagagggtggatacaaagattaaagacctaatttgcaaccttaaggatttatggcttagtaaggaggataaggcctgtgtataaataacaataacccagattcatataagattaagagccacaagagaggctaaaaaaattgggatgatagtgctataaagaggtgacatttcagcttggtggaagagatatcatttggactggatcttaaagcatacctagaatttcactgggcagagctagcttttaagatatatcaggcgatatgaaggatggaaggtcaagagcaaagggacagaaaattgagggtttgttcaagtgactaagagcaacccagttgggttgggagacaattagaagagcttagaattttgtcagaggacataggaggagaaacaagacagagacttgaggatctaatatcttggattctcagtgaagagaaagtcttgataaagttgtgataaatgttattgaaccagttgttgcagaaaaatatctttgtggatgatcactaataaagagctgaggcagttacagggtctctgatgatattcaagagaggatgttgaatagagatagtagaagttaaaagaatggaaggaggatgaggaaatgtgaatactcttttaagaattttgtattggaaagttagagaaagataaacttgtaggtcaaaatgtaacaggaaaatgtctttcagaatagagaaacctgagtgtattctttagcagcagatgaaagatcaaggatgaagaaataattgattgagagtgaaagttatggggaaggaattcgaaatttatgaagtagaatgacttgaaatagtcaatatgcggaacatgatataaagtctgctagggatgagaatcctcagcttagattagggaacttagatttttagtgaattcagaattcacgaaagttttgtgctatgtccaggaaactcttggtaccctgaaatgggagaggagaaagaaaaaaaagggcagaaacccagggttggagattagcttagacacaatgggaacccaaaagaataaataagaatattgttgaaatggttacatatgatgtccaggtgtagaagaactggagggttgggagctcaggcagggcttaagggcaaagaacaagtttaataggaaaagttaaagcaaggaagaaatgagaggttttggtcgaagcagagcatttcagagtttgagaacttagaggcggagaagtttagagttgaagatgaaattcaaaggacgggtatattgatttggtggtggaagaggtaggtgaataaagactatttaaatgaaggggtttaaggacttttcagaaaagaatgtaggagaattgtctgttgaagatatagaaggaggtgcaatcaaaaggaattaaaagttgggttcaagtctagaacttacatcttcagtggaaatggaaaacagcccttaatatattttaatacattttcatatatcatggatttggcaatgctgtgtggtaattatggttcatgtgtacctgatcgctgtgaaatagaaagaaaaaagaagtcttccttaccccataacagcatgataatgagattccactctcacagaaaagtgttactcattatttctcctattttctgtgtcagttttcaaaattctttgcatttttcatcacagaaatcaggttaggtaattaagtagccggtcttgtggtagatggtgatttggggaataattaaatgaggcctggtaagtgatcagggagtgtacttggcagctttttatattagctttggccttcactatgtactgaagatggagggattattgatgtaggtttcttccttgtcataagcttcccacacacctgaccatgctaaaagttcagctgccagtgggataccctagcttcttattccagacaccattttaagtggcctctactccagttatagctaggaaatataccgacattggtagaacactggtgaagtacccctccacgttgtatgcaacgagatattgattttcagcctttgcccattgtattgtgagcatcttgaggacaagtaatacacattgtcatttatgtcactgactcaaatccaccttctgttttgttacatgctggtgtttttcatggttgtaggaagctgtactggtcagaccaaggaactgacagtggggttcctgccaagatcgccagtgctaacatggatggcacatctgtgaaaactctctttactgggaacctcgaacacctggagtgtgtcactcttgacatcgaagagcagaaactctactgggcagtcactggaagaggagtggtatgagcaccctttcagtcttttggtctttatgctgagctggtgtagctgatgctgagtgttctgagctgtcaggcagtggttcttgaacaatcttacttggtaacttgtaccagtgtttcattgccccttctcccaataacttctctcccttgcacgtacctcgcccctagctgaagtccagttctttatagtatgtgcatagttccctatagggtaatgtttattaatttccccaccaacgtttttttttcttcaagataaattaattccatttgtcatttcttacttgtcatttcagagccatttctttcatggtttagtgatttcagtgtttttctttgaaagtactctgggttctccaattatagagaatatacatatacctatatatatggagagaatatatatataaaaaatatagagtatgtatctatactatatggtatatagaatctatatagattctatatatgatctatatagattctatatatgatctatatagatatagaatatatattatagaatatagaatatatatttatagaatacagaatatatatctattatatatagaatatagaatttatatatctgtataggatataggtatattctatgtatctacctatgtgtgtgtgtatgtatgtatgtatctatttatttacgtagcaaggttctgaactcagcatcccctcgtagctacacattcttctctaatattttaacatgattaatgcacatgcgaaactttctttagtggtgattttcaactccaaggttgggttcattatattctacaataagaagcagaaactataaagtctcgttcactcattgaaataggatttcaccttcactgagctggggctaagcacatagacaatgctcaataataattattgatgaagcattgctttgggtgctgaactgaatatatgctagtcccttccttgctatttaacagtagttacttcagatccttgacattgatgcttttcataatattgtgcagtaggtttggctttcagttcattgtttgttcaacaagtactaacttcactccgaatatggacctataatggtggtaagctttggagattaaaaagaagtgatgatgtgtgtgaaaacactttgcagagttgggtgcatgtgtgcaatgacgaggaagctcttgttacatggtatggtttctgtacacacatctgacagggcacagcttctaaatctacgtgcttgttagtggtgtgactctccaacctttctcctagtgtagttcccttatttctccttcactctcctggtttaatcatcaccaaatgctgcaatccatcctcagcctgtcactcatgcccagatcttttctgccacctccaccattctgagcaacctctctctggccttgactaggcatggccttcagtggtgaagcctgctttcatgttggagacatgttttcttcataaagccacagtcagcaagttggatcacggctcagcttggagccttgccctgaggagtagctcccaacacttctgtgaggttgctcagctaatctggtcctggcctccactctctccactctctcctccaggctcatgtttcttatattctaaattctagaactttgatcagtttcatcagcataaccactcttgtaactgctgggctcccttttcagccatggcagtaaagccacactgtgtctctcgccaatacccagcccagatcctggcacagagcaggcacttgaggcaggtttttggagtgaaattaaaccagctacatctacatttcatttttcttccagaagaagctgactacttgtcattttcccttagggactttattcttgtagttcttttccagtgtaccaaagctattttgattaaagcttgttatctgttcaaatttaatggcaccatttttggccctgtcctgtcttgctgtcctctgtggttgtttgggggcatatttccaatctccattacagaaattgtcagtgaaggtgttaaactcagggtgagtcagctcctgtgcaatggcccacgcttagatgtttgagtatatccttgaccagaatatcacatgcagggactagtggtttagctcccttttcttcaccgtgccacctgaaaaggttgactgactcatgtgagctccgtcttcattatcaatgaaaggggcacagtgacattttcctgacctgctgcttggtgtcgttgtgatgatcaaatcagaaaatagaagtgaaaaatctctgtaagggatagagggctgtataaatgtgagacattataattaggagaatattagtgtttaaatgttcaaaattttcactatgaatccatgaaactaatgaaaattccaatcctttagattgaaagaggaaacgtggatggaacagatcgaatgatcctggtacaccagctttcccacccctggggaattgcagtccatgattctttcctttattatactgatgaacagtatgaggtcattgaaagagttgataaggccactggggccaacaaaatagtcttgagagataatgttccaaatctgaggggtcttcaagtttatcacagacgcagtaagtatttgtcactgaaatacattcatgggtgtataatgcatattcacacataactcacatttgtaagcacacacccacacacagtttcacgtacatacacgtgcatacaaattgaagttacctgaaatatttaaaaaatgataatgaagtcttaaacatggttaagtgccaagggctaatttggcatctgaaaggccagattgacttcagagtaagtttattccctttctcttcccattactttcaattccttactttgcttttacttcatagaactccctgttttctattgtttgtgttacttattagaatataacctctgtacgggcaggcattttgtctgtcttgtttgctgctcaatactcggtgattagaatagtgcttggcacataaaaggtgctcagggcatatgagttggatgcctgctgggaaagtgctaatgggatggaatttttagtcttaaaaagaatgcttttggatgttgcctatttcaacatttttttcaaagataatctaatttctgatttacccctttaaattagtggtatgatacaggtattattttttgatgtattttatagctttcgtcttcagccaaagatgatcaaacaatttgtttcctgtcctataacctaagtttgtcactaggtatttttttaactgcatgtgaaagaaacacatgcaatagaaattaattttttattactataaagaatattcttttttttttatttttccataggtttttggggtacaggtggtgtttggttacatgagtaagttctttagtggtgatttgtgagattttggtgcacccatcacctgagcaatatacactgcaccctatttgtagtcttttatccctcgcccccctcccacccttcccccaagtccccaaagtccattgtatcattcttaggcctttgtgtcctcatagcttagctcccacataccagtgagaacatgcgatgtttggttttccattcctgagttacttcactttgaataatagtctccagtttcttccaagtcactgggaatgccattaattccaggactattctttaaatcttatttcatatatttaaaaaaaatcacattattgatcatgtaactgaacatattattttaagtgccagttcataggcaaattatgagcagatttatatactgacctccctaatcctcgcatgatttgtagaagaaaacaagtgaagccccattctctaactattatacaatagttgggttactggtttcatacctttaggtgttattgtataagctctagtctctccgatgttgtttttagattgctaactcagctactatatgttggttattaatttttagaataaattatttggtgacccaattaaagaaatttgagatggggtggcgagtagctaggatcaaaagttacaaatggattttgttttcatttagatgccgccgaatcctcaaatggctgtagcaacaacatgaatgcctgtcagcagatttgcctgcctgtaccaggaggattgttttcctgcgcctgtgccactggatttaaactcaatcctgataatcggtcctgctctccatataactctttcattgttgtttcaatgctgtctgcaatcagaggctttagcttggaattgtcagatcattcagaaaccatggtgccggtggcaggccaaggtatgccaactccaatataagtaagatttgacttcatctggcaccaggttgaaatccctggtgccatgaaaacatttcttcatgtgtggattcagtgcataatgaagctttcctttccctttaaatcaactggcacagcctaaagtgtttttcaaactttagtgtgtctcagaatcacctggagggctcacgccaacacagctccagacctcgtccccagatttttctgattttgtagtctagggtagggccagagaatctgcactcctaataagctcccagggcatgctgacggtgctggcccatggatcacgctaagaaccacaggcccagagcaatatagaatgtaggatgggtttgcaagaagtactacagagttggtgttccaaagaactgtgccctatttctgattattaatggagatttatggtagaaggtatactactatttaatatggtaatgaaatagtccacaaatatgatttattaatatatatttggtgaattgaagcaaaagagttcacagtgtcagtccctctttagtaatcatatttttgcagcactttgtgcttacatactgtgaatgtatgaaacgatcacttgcttcctagatgagccaaggtttttaggtataccttagcacaagaggaactaagagttttctaacatcgctaggagaatgtcacaggctaaagagagaaatagagggtagaaaggaaggaaaaaaggatgaagtcaatgaaggggttgtagagatggtcagaaaatacagaaatgcacctggagaagggaatcagagagcttccagtcccacacgtcctcctgcctgatggtcatgttcacgtggacccatgactcatctttgtttttccatatctaaaaagttatggatctaagttatcatcttgtacagatatgacaaattcaatagtttttttctcccagcttttcattaaaaaaatgttcaaacacagaaacgttgaaagatttaggaaatatccttataccctttaccaagatttaacagttgttaacatttcttcacatttgagctctcaatttgtatgtgtgtgtgtgtacatgcatatgcattcacattcattttttatgaaccttttaaaaataaattttaataccatgccactttacccctacatatgttagcatacagtttcaaagggcattatgaaatattcataatcatatttctccagttggcctcacaatattttatatatagctgttttgttccatccaagatctaatcaagattcatgcactgcactgggaatatctcattagtttcttccagtttggagtagttgcctctagctttttgctatgacattgatgttttaaagaggcagacctgttgtctttgagaatcccacactgaggatttgtctgaatatttagtctgtctttcattttttaccctgcagttctcatgaaatggaagttaggtctaattgcttgattagatcaaggttaaatacatttagcaataatactttataggttatgctgtgttagttgatacagaatcttattaggaagaacataatgtcagcttgccctgctcttagtggcatttgagtttgatcacttggttaaggtggtcactgctacactgctgctttttaaagctgtattttttttccttcttaattttggtggaatctatgcaatcacacttaggccctgtgaatgtcttggctcccaagcaccttttacccattggttttggcagccatggatgatccttgtttgaaatgattatttaatcgaggattgcaaaatggtgattttcttattttagcattccctttacatttgttagataatattcttctataaaggaaagctcttcgtgtctccccggtttactttttaaataatttattattattatgggctcaaatttttattttttaaattcagtgtgttacagtcaattactgtaatccttcttttgatgttttagtggatccattttggccagggagaacctcttcaagtggcgacctgtatatttctgtgtatgccttgtttcttggtacaataagatgtttcacactcacttcgtaccttccctgcctaaacctataatcaacatttctcccgggagccagagctccttattgtgggaaagagtagaaaccaagatgtgggtctgctcactgcaactgggaaaaaagggtttcattttgtaatggggagatgctcagagcagggggttgggaatgagggtttgagaggaagggcagacatttaaaagttctaatttcagtgacagcattttttaatgatcttttcttaacttccaggacgaaacgcactgcatgtggatgtggatgtgtcctctggctttatttattggtgtgattttagcagctcagtggcatctgataatgcgatccgtagaattaaaccagatggatcttctctgatgaacattgtgacacatggaataggagaaaatggagtccggggtattgcagtggattgggtagcaggtatgtaagctatatggtgattttaatatgtttgcatctctgtcatcttattttatgctagaaagtttagcctaactccatgtgctacaggtttgtttttctagacaattattaagaccatttaagatacattgaatctagattaagctacgtgtctatttgataaatgatacggtgtttcagtttacagatttataacaaattaatccttatcattttcttctgttattaacataatctggagacaaaagtggctaaaatattaaattatgtggatttgttttttttacacttagatttgcacctgatttctgcattagaaattttctaaattttcaagagaaagagatataaaaatataaactatggaacagcattcatttgctttgaagctgagcaattttagttgccaaattcttaattgcttccttttattcatatataaaaatcccttagatcatgagatattttattagtaatttttttaaatgcctggtccagtattatattaacttagttgtatttattcatgcacataagcttgaataacccctcatttttatcactcatctgagtaaaaataccactcataattagtggtattatatgttttggaatataatccaattctacataaaatcagtatcattgaatcaagcttggtgagtaggcatcacttagaaatattagcatgtaggcagggcgcagtggctcatgcctgtaatcccagcactttaggaggctgaggcaggcggatcacctgaggtcaagagtttgagaccagcctgaccaacatggtgaaaccccatctctactaaaaacacaaaaattaaccaggcatggtggcgtacgcctgtaatcccagctactcaggagcctgaggcaggagaatctcttgaagccgggaggtggaggttgcagtgggccgagattaagccactgccatcaagcctgggtgacagactgagactctgtctcgaattaaaaaaaaatttaaaaaaaggaaatataagcatgtattatgaaaatctaagtactataataagagtttattgcaaaaagtaaatatggaagtatggttaaataaagctttaattgggttcctaactcccgttcctgaatagaaattactatttctgagggtatagataaagcagtagtcagcaaactatggcccgtgcgtcaaatgcagcctgttgcctgtttttgtaaataaagttttattgtaacacagctatgcccatttatttgtgtattgtctatggctgctttcatgttacagtggcagtgttgagtacttgtgaaaccatatgctctgcaaagcctaaaatatttattatgtggccctttacagaaaaagtttgccaaccctggattaaaggattggaaatgagcaaatgcatacatagcaagtagagttaggtaatgaaaaaatgtatcagtaacatatttcacattggcctgatttctctagaggtggtttgaatcagatataggaacaaaatatgtgtgtcttggtagtagcattgatagttcaacaacagactttcaactacatgaaatcaataatttgtggtcattctctacttattatactatcttcataaagttatctttttattctagcatgtacataaggcccaaagggaaatggacttttggtcacttttagaaggtccatgggatgaaaacacctacattagttagaaagactaaggaaaaacttcatgttaaccttaagttcaaagaccatttgataacattaataacaacctgagatgctgctggtgctccctctttgctacttttatcacattgggatggaagttgtgctatgaaaatgtatatttagagtgtttcaagtaggtattaagcatttagagcttcagatagaaaaggagggacattctggaaaatatacctttcagtagaaagtgggttatgatgttgctatgaattctaatctactttagaagctgaagataggcactttctctctaaatttgaagacacaatctctataattcctaggagtaagaacttatttttctaagcctagactgggacactatcatcttggaaaagacaacatatagtgacccagacttcaaccttatatattttgttctgaatttgtaaagttctccctttttttcttcttggttctccattgatcagcatgcactttcatttttcccataggaaatctttatttcaccaatgcctttgtttctgaaacactgatagaagttctgcggatcaatactacttaccgccgtgttcttcttaaagtcacagtggacatgcctaggcatattgttgtagatcccaagaacagatacctcttctgggctgactatgggcagagaccaaagattgagcgttctttccttgactgtaccaatcgaacagtgcttgtgtcagagggcattgtcacaccacggggcttggcagtggaccgaagtgatggctacgtttattgggttgatgattctttagatataattgcaaggattcgtatcaatggagagaactctgaagtgattcgttatggcagtcgttacccaactccttatggcatcactgtttttgaaaattctatcatatgggtagataggaatttgaaaaagatcttccaagccagcaaggaaccagagaacacagagccacccacagtgataagagacaatatcaactggctaagagatgtgaccatctttgacaagcaagtccagccccggtcaccagcagaggtcaacaacaacccttgcttggaaaacaatggtgggtgctctcatctctgctttgctctgcctggattgcacaccccaaaatgtgactgtgcctttgggaccctgcaaagtgatggcaagaattgtgccatttcaacagaaaatttcctcatctttgccttgtctaattccttgagaagcttacacttggaccctgaaaaccatagcccacctttccaaacaataaatgtggaaagaactgtcatgtctctagactatgacagtgtaagtgatagaatctacttcacacaaaatttagcctctggagttggacagatttcctatgccaccctgtcttcagggatccatactccaactgtcattgcttcaggtaagtgcactccaggtgctgcttgtcctgcaagtagacacaatggggtcaacacacatggatgactgagtgtttctaatgcatatgagactctaatgtctttgtgtgtgcttgtgtgtgtgtctgcctgtatgtgtccaggtatagggactgctgatggcattgcctttgactggattactagaagaatttattacagtgactacctcaaccagatgattaattccatggctgaagatgggtctaaccgcactgtgatagcccgcgttccaaaaccaagagcaattgtgttagatccctgccaagggtatgccatcatcttccttgttatatttctgtctgcttatttctggaaaaaatggggcctgaaattatgttcatagatagccaatgtgttatgggcttataaaactatggctacagattcaaaaatgaaagcatattgagtgattttacgtgggaaggagggtgcagcgcatagctccctttgatggcagaaaggttggcaacatactaggaagtcaacaccctgacttactagatctcctttggacaagttgtgtaagtagaaatgaagtttcttttgccatgttactggcaatttgcaattaaagaatattgtccttttttttttttttaaaggactatgaggttccctgtgaattaattattgactccttttgtatgactaggtacctgtactgggctgactgggatacacatgccaaaatcgagagagccacattgggaggaaacttccgcgtacccattgtgaacagcagtctggtcatgcccagtgggctgactctggactatgaagaggaccttctctactgggtggatgctagtctgtaggtgtctctggttactcatgtgggtgttaagaagaggtttttcttccatttccaaagaagagggatttgcatcatgtgatgaaaatatagcatgccagatagacattgccagaatatagaatcacagttttaggaactatgtttatattggaacttggtgaacatactgtgaaaatttatctatatcatgcattgaataattatgaactaaaagacatctaaagatgcattgctaaatatatctataatttcagctataattataaatgtattttctcaatttagaattacaaatgaaattactcaacttacattctgcaggccctaggtaactgctataaaatctgaatgacttttaaatgccaattgatattatgtttttttctgggctttagcattcaatgtcttttagaaaattcttttcttaaaaaaaaaaaaagaaaattcttttcttcagtctttgactttttgtcatcttttcaaatagaccctttcttctctggcaagcttctcctcagcgcatttcttaatattttccttttgtcaactctaattttgtatgtaacttctccaagtaccccccatatgtctcacattccagtcatcctaatggaatagttgaagggatgaaatgattttgtttattatggctggtgtctacatatcgggaatcttaatttttcttgcatatttctttggaattttagtcttttgatgccaagacctaacctcctgatcttttctttattctcctatttgaaacaaagcagtgatgctttgagtctaagcttggattattctaggtaaacacctcaaggtactcaataaacatcaaattgaaaaagtcactaaggaagtgggatggaaaagttattgttttattgagagtctgctatgtgcttaacactgagttccatgcattacatggattatttcatgttttcctgtttctaatatcaacctgattccttttgtaggattactattcatatttggaagtcaatgattttatataggctattgtttgataagcaaacaagacctcccatcaccagaagaaacatttccagctgccatatgccccatttgaaaagaaagtttgcagcttgtgtaaacaatgatgaggcgcatgcattgggctgccagttgaaaacttaactcacttgagatttcaacttctaaatttttttttgcttcattttaggcagaggattgaacgcagcactctgacgggcgtggatcgtgaagtcattgtcaatgcagccgttcatgcttttggcttgactctctatggccagtatatttactggactgacttgtacacacaaagaatttaccgagctaacaaatatgacgggtcaggtcagattgcaatgaccacaaatttgctctcccagcccaggggaatcaacactgttgtgaagaaccagaaacaacagtgtaacaatccttgtgaacagtttaatgggggctgcagccatatctgtgcaccaggtaaggcactgaccatgaaaattagaacatggagaataatgatcacaataccaattggtaaggaaagctgaagttctcacaggagaaaaaattcaaattctccttgatgtcagggtaatttatgaaacagacctggggctatattttgagaggaagacttggcaggcttcttttctaatctatatggagcccttttatgaaagcattttcttttattttatttttgagacggagtctcactctgtcgcccaggctggagtgcagtggcgggatctcagctcactgcaacctccacctcctgggttcatgccattctcctgcttcagcctccctagtagctgggactacaggcacacgacgtgtccagctaatttttgtatttttagtagagacggggcttcaccatgttggccaggctagtttcaaactcttggcctcaagagattgcccacctcggcctcccaaaatgctgggattacaggcgtgagccacagcactcagcctatgaaggcattttaaatacaagcttgatggagttagaaagaaagatgaaggccttggctgccctacttcatgtcttgactaagaattctgtcaatgagctggccttccttataaaaggatttacattttctgcttaagaggtattatttatagtttgaaatatttctggtgatatttgcgggtgggatcatatgtgcttcattgtgcattttataaagaacaacaaattcacgggaagatgtgccttttgatgttgttgctttgcaaattttgctgagaagagtcgttgatatttcctgttgtttagaaggaatcggcacatttattagaaattggtgattgctcttcttgatggaaaagtgactcagaatatagttaaaaggttaatgggcagaacttccatggcgcttcttagggagcatttaatgtagaagctgttgcaagtgctattgtggaggggtcaatgtgaacggtggctgcatccatcttttacttcttctgggattatctttcttcaggtccaaatggtgccgagtgccagtgtccacatgagggcaactggtatttggccaacaacaggaagcactgcattgtggacaatggtgaacgatgtggtgcatcttccttcacctgctccaatgggcgctgcatctcggaagagtggaagtgtgataatgacaacgactgtggggatggcagtgatgagatggaaagtgtctgtggtgagttggactcttggcgcttttggtaggagctaatggcatcttgatgtcaagtgtttggtatggaatcctgctatgtgtgaatgtgtttgaaatgtgtgcctaggcatcctggtagagctgaaaaatgtttcctctgataatccagactgtttctgttaaatcacctctgtagtggttaagagcacaagcacaatcatcatcctggtgatcgcatttgtaatctgtatagacctgggaaagttacttaatatctcaagcctcagacatctcatctgtaaaatggagctactactagggttcttgcgaggagtaagagaaacaatatgtaaaaatcccttagcatgaggcatggtgcaagctaagtctagcttagcttgggactaaggaaacgtatcattttaccaattttcgtagcacaaaggtcattatttcaaaaattttatgaaaataacttccaatcctcagcttccatctgaatagagtgaataaaacacagtggactttctcagggagttctgaggttggttaccttttcctagcagactgtgataggggctaggagtttttattttcctgaaataaactataattgcatgctttttgtgattgagataaattgagattatagagaaacagaatgactttgatttgtgcttaaattacttgatttgtgcctaaaacaattttaaaaatgtatacaacatattttgcttaatctaactaattaaaagtgttatctcactttgcatgcagtccattttgcagcgttttttgccttggaaggtaaattcaaagtgtctcttttatttaattgtatctttttaaaaattaggataatgttttaatcaagagggtttgttctcatgtttttcctgttcttagcacttcacacctgctcaccgacagccttcacctgtgccaatgggcgatgtgtccaatactcttaccgctgtgattactacaatgactgtggtgatggcagtgatgaggcagggtgcctgttcagggactgcaatgccaccacggagtttatgtgcaataacagaaggtgcatacctcgtgagtttatctgcaatggtgtagacaactgccatgataataacacttcagatgagaaaaattgccgtaagtttatcttaagtgcttattgtgattttgggtctgaagtcttggatcacaggagatgaaattattatataaaaaaaaggctttccaaaaataaaaaccctaagtatttatctaaaacgtaaatttttggctaggcgcggtagcaagtatcaacaaataccaatcttgtttcatttttctctccttttttctagtattttaaagtgactcctagtcatgcacttcactgataacattttggaaaataactaccatgccattataatgcctggcaaaatcaaaagtgcttactaaatatccctgagtacctagtccatgttcaaattttgtcacttatccccaaaatgtatttttactgttctctgttcaagttagggttcagatgagatctacaactgattttgattgttataattcttcaatctcttttatgccacaacacttcccactttttaatgtcattgattcattagaaagattaggtgatttgtcctgtagaatatctcacattctggacttgactaattgcataattgatccatttaatttatcttatccctcttatttcctatgaactggtatgtagacctagagttttgatcataacaggtgcaattctttgggtaagagtatttcagaggtggagctgtgcctttcctgttgcatcaccttatgaggcacatgatgttttgttgccccactttaagtggattctggtgtcagcctgaatcatctcttatgaagctcccatcatcctttcacccagtggttttagcatccatcggtggttgttccgtaaacccattatttctttaagagttatgaatgggctctttagaattctagtgttcctgccgcatttattagctgaagtttgataaagaagacatttcccttaccagcttttgttggtaattagaatctacaggataaataccttttgcttgtcaattttcagagtaatgagttggtgacaaaggagaattaactttttgtttagtttagtttagtttagtattatattgaactctttgatcttcatgtatttgatgagttttaatacagtgctgtcaactgttttttcttggtgcccagttgtccaaacttaggccaatgggagtccttaacttgaattttctgttctttggcatgaccccaatccatcttcttatagctcaagcttgtcttatatttcctgtcccagtcctggaattagccacttatccaaggagacctcattccctttgtggtacttagaaattatcacagggttgagttgctcattcctacttagctttcattgcttctagtccttttcaatggtcagagctaggaaatacagtttttaaggaaaaaaaatttttttatttttttgagatggagtcttgctctatcgcccaggctggagtgcagtgacgcgatctcagctcactgcaagctctgcctcccgggttcacgccattctcctgcctcagcctcccgggtagctgggactacaggcacccgccaccatgcctggctaattttttgtattttttagtagagacgaggtttcaccatgttagccaggatggtctcgatctcctgacctcatgatccgcccaccttggcctcccaaagtgctgggattacaggcgtgagccactgcacccggccagaaaaaatttttattgatatttcccattgaaatttaagattacaggttgtttacattttagattttataatgacatctcttcttatgcttaaaatcatagtttctcttgacatttagttgttttattatatagtaatttcaaaatgcctataataatttcaacattattataaccactcaaagaatactattaacaataagtctactaagtgcgagattcttcttgctttttagattatgtcccactagagatatgcagtcaaaggtatgactttaaagatatttggaatttttttttctgcagggttatgctatcaacctgatatatagttagctttatctattgctgtttccaaattttattttattttattgattttatttgtacaaaatagcatacatagttccaaagttaaaactacatgacgaggtgcatttatagaagtccttcatttcttcctctcctttctgcttcctctgtgctcttctcagtctatccagagagatgacaatttttgttagtttatcttttctttgttgttattgtttttaatataagcatctctctcttgctacacacacacacatacacttatatcgtcctttttcttacacaaaagttagcctactgttttgaatcttgctttcttactattaacaatatatcctgaagattatactgtcattacttatcagtatatagaaatcttctttattcctttaatagctacatattactccattgtgtggaaatgccatagtttattttaccaagagttggaactcttgttgatgctattaattaatgaaaacagatgatttaagttacaaaccagtgtctcctctcccttctccccagtatcagctggaaatatgtttttttactacagaatctataggtaacataagtatcatggatcctgcctttctgatggctttgaaaatgccgcccttccagtggtttgagttccacaatagatgtgttagcacggatactgttcataatacatatttggtggatatattcctaatatttatctggttgtctttttcaagctgatcgcacttgccagtctggatacacaaaatgtcataattcaaatatttgtattcctcgcgtttatttgtgtgacggagacaatgactgtggagataacagtgatgaaaaccctacttattgcagtgagtaagataaaactgctttctttctatcgttccagagatgcatgttgtgagctaatacaaagatatgaagcgtgggtattcgggctgatttcaattgtcatttcacattgaccttctaagtagaggtggtaggcagttgctttcatatgtgattgcaggggtatgagaaactctttctctctgttccctggctagaattcccagaccctgaatatttcttccagagatctgctactattggagagccatttctcccagtgttgaaagccttttgccttcatgtacttaggcagaatttgcccgttaagcccttataatttactcttaatattattatagtggccatcagtaactgaaaattatttttttttcagacagtctcactctgtcacctgggctgtagtgtagtggtgtgatcacagctcaccgcagcctctgcctcctgtgctcaagccatcctcccatctcagcctcctgagtagctgggattacgtgcatgtgacaccatgcccagctaatttttgtattttttgtagatatggggtttctctgtgttacccaggctggtctggaactcttgggctcaagcgatccacccatctcagcctcccaaagtgctgggattacaagtatgagccaccgtgcctgaccagtaactgaaagtatctttatatcccctagatacgttggaatttcagaaatctctatttcgtatttagcaatttggttcattcaaacaatttcctgtatttatagctcaaattaaaaggcctttcttaagtttgataactttgagactattagtgtaaatagatacataatttaaggatttagtgattggacttccctgttctgtgtatatgtagttaaactcttgtcactggcccctcccaaggaaatcaaagggcatcataattatttgtcaccaaattagggtacagcacaggaagaggaatctgttgtaataacagcagcacaaggaagcagaattcaggttgcagccaccagatagggctagacagataggaattattgctgacttttcagggacctctgcttccattgtcagttctcccctggcaaatcatcagatatcaggggccaaagcaaaacggccttatagaccagaagaattacaagactttaattagatgtgcacccacataacaatttggaaaatgcatataaccagagctacctaaaattactggagaaaagagtcaatgttcaaacataggcagagtttcccacttactcaactaaaagtctggtattccaaggatgaatacgaagataactttgccaactttctagagttattatctaacatagctaaaaggttgtgtgtggagcgagcttagatatgatcacattattgttttgcttttaattatcattgcaatggaatttatttaatcttacattatagtagaaaaaataaaaccaagacttataatttgtgatttcatttatcacaaagatagttctttggtatttctaacaaatacaattttttttttttgatttctggaatctagaaaaacaaattggggaattggggcaggattgacttccttctgtctcccatacttcttcctccccacagaaagcttacacaagcatccattttccaggctcagtcttccttttttggtaactattatctagctcagagatagaggcagattgttaagactgatgggaacatgcttgtgttttgctcatgggttttatcttctttccctcctgcagccactcacacgtgcagcagcagtgagttccaatgcgcatctgggcgctgtattcctcaacattggtattgtgatcaagaaacagattgttttgatgcctctgatgaacctgcctcttgtggtaagagagtaagcaagcatgaaaaacatcacgatgcagctagacaacttcagtctcttccaactgcttcaaatacagaccagggtcatggctgctgaatgcttggacttcctgtcccagctttcatctggaatgctgacaccgctcagcggatattcattaagacctgttagtggagagcactgtgtggggagctgatcaggatacggaagctgctgattgatgctgataaaatgaaattatattggtgatgcacctaatacagtgcttagctggtagaacttaattttagttggctctcaattgaagtttctgaatttggttgagtgctggcccagaaagctgtcagaggacctaaaagtgattggagtcatatacatggggaaggagtatattaggagcatgcatcctcttcctgttctctctctgtgccagtttatgagcacaagaggcccaagaagttgcaggagcctttggttgtattcctggggacagttatgccctgtttacatttggaggctgctatttgccttcacaaattctaatctatatccatgcacattttttacataattgtaaaaatataaaaatacaatcttctacattgctttaaaaaacctgtcaataaatcatattgctatataggagtcagaaaactatggctgtggccagttgcctgtctttatagatagcattttactcaaatgcagccacatatggctgctgtccctctactatggccacgtcctgtaggtgcaacagagaccatagggcctgtaagcctaaaatatttactatctagttaaaaagtttgctcgtccttgtcttcatactgccttttaatgactataatattccattgagtggttatagtatcatcaaattaactgcctctattattaagcattaggttgcttttattttattcctctatagtatatatcattgcagtaaatattaacatcgtatttaaaacattttattttcaggatattttcttaggatcattagtatagttttatagctgaagtcaaactattttcaattccagttttctctcaggtttaaattctgtgttgaagagtggtatttggagtgcttcactaagttctttttccccaacactgaaagttttatagaaagcaaagggcacatagagttttgaggacctgtaaaggaaataactaataactgctggatgagtagaatagtcttagagattgtttcaaatgtatgaattattggttcaaatatatgaataattaatatgagtttttaaacttctctatggtaacaaaagccatagtaatagcagtgagtaccaatgacctgatatatttaaataaaaataagcacataatctatatatgaatatatcctcattgtagtaaagtaataatattcagaaatatattttaaagaaataatacgatgtacaaaaaagtaaaatttacattttttcatccttctccaatcccctcactcctcaaaggtaatcactattaaaaggttgagtgtgaatttgacttacttttatcttttatatatcttactttacttttatatatcttgatatatagattttaaaaaaacagatggagtcttactatacatattttctgcaattagcttttattttttaagcttaacatcatgtcagcaaatacagaccagcctcattcctgtacactgccaaagaatattttaaaatgcgaatggtccatgtatttttatccttttcctagtggttggacatttaggttgtttccattttttcactatgaaaaacagtgtcagggtgaacatcctttgtgcacatgtggaaagatccttatggtctagatgtccagaaatggtgctgctgtatcaaaggagatatgtctcttcaaaaaatctggatcaggccaggcgcggtggctcacgcctgtaatcctagcgctttgggaggccaaggcaggcggatcacaaggtcaagagatcgagaccatcctggccaacatggtgaaacctgtctctactaaaaacacaagaattagccgggcgcggtggcacacgcctgtaatcccagctactcaggcaggagaatcacttgaacctgggaggcggaggttgcagtgagccgagatcgcaccactgcactccagcctggccacagagtgagactctgtctccaaaaaaaaaaaaaaaaaaaaaagtctggatcaatgtacacacttttcatagcagcttctgaaagagcctgtttcttgttactgttatgatataggctgtgtctttatcagttgcaactatactttctcttgccttaggctaattccagggtcccctgggtttgggagcctatgacaccttcattagttaaataggaacatgtggggttagggttagagcatctgaatcagtgatggctaatttgaagtagaagagtgacttattttaattcagtatttattgaacagtggtgttctaggaacttttgggctgtgtcagtgaataagacaacaatccctacccacatggagctaatattctaaagaggggagacaggcaaccaatcagtaaattgtctagtatgttgaaaggtggtgctaagtgttatggaaagaaggaaagggagcaaggaagcgggcatggggagtgcaggcgaggggagactttgcacaaaacaaaatggttttggatgaaaagtagattttaaaatagaaacatgtgaaatagtaggtaattcatatctttcctgggaaaagaagtgttctttctctaccatacacataagggaatattgtatctcattttagtcaccaaagataattagggctttgcactgtcagttgactacttttacctcaaactgttggtcgctggtactagtcttattggaggactaccctagatgtatataattaaataatgctctgtttcaggttttctagacaacccatgctacaaccagcttgtctccagattcctggactgtaaaccactttttttcactgagaatgctattgatcttttcaggtcactctgagcgaacatgcctagctgatgagttcaagtgtgatggtgggaggtgcatcccaagcgaatggatctgtgacggtgataatgactgtggggatatgagtgacgaggataaaaggcaccagtgtcgtaagtgaagccaattaattcctctgcagagtcacattccagggaaacacagtagagttgtttttctgtgtttggagagtatgattgcagatttctctgtaattgaatggacactgatagaatgttacctttgtttctccatgctgggagtgtttgatatcatccacttaaatgcttcagagtgatgaaaaatgactttatgtttactttctttctcttacatttggctaatggacataatgtcctacatttctaggggaaaaaaaaaacccacaaatacttggttgtctccttttcttttttcttttctttctttctttttttttttttttgacaaggtcttactctgttgcccaggctggagtgcagtggcggtatcatggctcagtgcagcctccaccttccaggctcaagcgatcctcccacttcagcctcccaagtagttgggaccatacgcccaccaccatgcctggctgattttttatacttttttttttgtagagacgaagtctcactatattggctaggctaatctcaaactactgggctcaagcagtcctcttgccttggcctcccaaagtgctgggattacaagcatgagccactgcacccagtggttggccactcttaatagcaaccttcacagtataacaatgaactgtctctggtttcctttgtcaccttaaagcggcatggagggaggggtgttatgcctcttgagtagataatggaacatcattttcattaccaacagggtatggaaatcttagctagttcaagaattaatctaatcggtgttagaataatgtctttctatggtagggcaatagactcaatggctccctgctgcttgcatctgatggcaccctcctgtgttgtgactttggtggtgggtcacaactccacatttaccctatccaccctatccactgacatgggtggttttcagctacacatacatggattgtggtgtatgcatttctctcacctgtctttaccaacatcatcttctttcttttgtttcctattcacctgcaatgagtctggataaaacccctgttcttttattttgtggacactaatgatttgatgtcagcatctcacctctttcctcatagcatcatggtttctgacaactctgttagcatatgcctttcctctccaccccaatattgcttggggtggtagctataatgtagttggaaaagcactaaatttggaggagaaagacctaggtttgaagccccagctcttcacctagttctatgactttgagacatccagttaaccatctttgagcttcagttttctcatctatacaaatggtgtaaaaatacctatttcacattgtgcttgtgtgattatactttgtaaactaaaaaaagttaccaaaatataaggcattcggtatccagttaacaaaatggtagtggttttctgaagccctaagggaaaaagtatgaccattctaatgtattttatggaaaaataaatgagacattttattgtattgatttctttgaaaaagccagggtccaaagcaattaaaatggaatctttggaggtatttttattatgatctattattataatagcagtgtaatttgtctacgtgttttcctcccatttcctttcatacttagaatggtaagtaacattaaagcaaagagaattaactgctgcactgagctctcatgctttctgattcttgcgtgctttggtttcagagaatcaaaactgctcggattccgagtttctctgtgtaaatgacagacctccggacaggaggtgcattccccagtcttgggtctgtgatggcgatgtggattgtactgacggctacgatgagaatcagaattgcaccaggagaacttgctctgaaaatgaattcacctgtggttacggactgtgtatcccaaagatattcaggtgaattgaggattcagaagttacccagcatgcctcaaatgtccatgggggctgggctcacttacctatcaggcaccccgtggccacagtgcccagggcccatgatgcttttagtggcttatgaaaatgtttggattcctttccaaatcaaagggaaaaaaaacttttacatcaaagaaagtattttaatatataatattaatatatctggctttataccaatatgattgcattaaaatgaaaagaagttacttgaattattaatacataataccatattaacaatttaaaattaaatataatttttaatatttttatggaggaaggaacccaagaaggcaaaaatgcctagggcctgtgaaagacagaatctggccttgcacagagggccagggagatgaatggatagggcttgagataagaattctttcttgaagctggtgacccgcttagttttccacttggagtagaggcattggtattacaagaactgtttcactctcttctctctactacaagaaaaataacagcacaagcatgatgataaatagagcttggctcttaggctcagagtcaagtagaggcaggtggagtgaactgagacaatgtctccaactaaggatgcagacattgatcaatatcatgcagaagggctggaaggccagactttctgatgctctctttttgacagaagttggaaatctggattttcatttgaaatactctgattttaaatgctggaaacaaattttaaaattcttaaaacactgtgtggatcaaacagattcggctcacagcctgctggtttgggggacctctcctgcaatgttccattgtttgacttcttacctctttctccaaatgggcctcttcaaacagtttatatacattcttaacatcccaacttctcatcatcccacttaacaaatacttggattatggaaggaaatggagaagaacaatttgtaagtttcaatcctgattgactaggaaaatagtacgagcattagcaaaagtaggggagtccagaaaggcgcttgctcaaggtggaaggtgagtttgacatagtaggacttcctgaggtgaaagtatgtcttaggtatttgggcacaactggagccgtgaagagatattgcttgtgccaaggactgttaagggacacacacaggcacattgagagcatcaggaatggccaccttacagcatgcgaaggaagacagtgggaaagatatactaagtaggcacaagatcagagaagcagagtcacaggggccattgactggaggggcaggcagctcatcaacaggcgctaatgtaccgttggagtccagtgtggtgtacgattgtgtgtttattgtggtggtcctgaggaagaaggaggaggtgaaggagcagggactcagcagtaatttaaaaagtagataaatgctatcaggaaaatacactctgtgggtgattcatcctctgatgagtggacattgctgagaggtggtagtttgtgaactgacaatgcaaagacattcaagaggtggagctgtcttcttttgtagtgaagctgcagtagaatatgctttgtttgtatttaagtaatatgaatgtaaagtgtagatttttattttttgcacctaaagtggataaatctttgtctatattttctccctactgctcaagagttctattgtgttgcacttctatagtttttctgaatttggtaaatagctaatagcattagtcttagatgtaaatatattctgaatacctaggcttagactctaggcacaagaatggtagcaggtgttgattttgatcagactccaagttatctcctttattcctcccattctgagctttctgggttcttcctttatcattactatgatctcacagcacagtaacatttcctctctccctttctttgttcgtccattgttccttccttcactttccctccctttctctctctctttctttttttccttgagctttctgaatttccttgaaaagggctatagtagaagagaaaaaaaaatactgtttgtttgaaaacctgagctatcagcttctaagtaagtccaaaatctgtgtctggagtagcctctactaggtgtgctgttagtgtgcatctccttgcttgcttggcagaaagtgtgctccccatttggtacagtgggacaggagatcatttttcctattgaccttctttttttcttggctcactactgatgctgctgaaaaacatggatgataagactgaggggtgacaatttggtgatgagctggaatactgacttgcaatagtgtctgaaagcttggtgatttgcttgatgacttgtttttcctcctgcattggatctaaattagacaaaggaaaacattggtgttttcaaaccatttggaaatgagttaaatagctcccgggagaccaaatgaagctgagccagtctgccttgaccacagctttcttcacaattacatgcacacattttgctgtaaatcatgttgacaaggccctgggtttatggatggcagtgctggttagcaggcctggttataggtcagttgtaaaactgaccacattcaccgttgttgccttcacattttgtaatgctctatgtgccgctcctatgctttctatgataaattgttcaaaaccattagctttgttcactcttatcaaagattccttgatgcatatgtgagaccccctttagacatcataacttttatgggatcttggagtaatatggagaagaaaggccagtttggctcacagaacttcaggaaattatattgttataatgatgcctgtgtatgttaggtcccgagatagcttctagtactacagcatgccttcttcctttgccagtatgccatgctaacctactagcttgcctttattcacatcaccatgaagactcacatctcatgatagatggcaggagtgtaatgaaagatggaaggaacaggactgacaatgtaaacgttattccagtgggaagatatgtgttcttagaggacacacccaataatcttatttataatatatagcactcaccctatgagtttccatttgggtatgggcacttttatcatgtgattacccagtacattgccagtgcctactggctatctcattatctgttgaacatagatagtgccactgttcataagctgtctcatagatctgatgtataccaaaattacaaaagttgtatttaattagtttatcaactaaggaaaaaatgaatgcaattatttttaatagctatagacctactaattatctatagctattaaatggtagcatttaatggtagcatttctaatggtagcagccagcccctgaggaagttgtgtggaatgccaaatattggattcttctagaattggcgattagtggggtagacgaagatgatgggggaaaggggatcaaggacactggtgatcttgtcgaaatggttgacctggcatttaggtagataaagaaggaagcaaaaccccaagtgggtaatagttgaggtttattgccaacctctctgaaagtggtactggatctcatgatacaggtgtgaccggcacaatgactgtggtgactatagcgacgagaggggctgcttataccagacttgccaacagaatcagtttacctgtcagaacgggcgctgcattagtaaaaccttcgtctgtgatgaggataatgactgtggagacggatctgatgagctgatgcacctgtgccacaccccagaacccacgtgtccacctcacgagttcaagtgtgacaatgggcgctgcatcgagatgatgaaactctgcaaccacctagatgactgtttggacaacagcgatgagaaaggctgtggtgagtacaacagaggatttgggaaaaggaaacaggggagactgaatatggattctcaacccttcacgacttagactttccaacctgtcctctaactacaaagttaccataaaatcactattcctgatatagcaaaaggttaccaaagtttcttggtatataagatggggacacacatttttttggaccaattctttgcttagatagtcattagagagaacagaagatgggcaaatattcaggccatcatttaacattattgccaaataaggtactcaagaatgaagggaaccaggttgattctctttgaattcttgtaatgactttttgcctgaagcatccctctgctagaactcgttggcctgttcttcatttttgtcctcaggtaattgaatgggagagtttaatatctctctcaccccaaccaccacaagtaaagcagttgagaatccacagcatgggcattgtttgcttagcaccatcttgaactccataatattggcagttcgtcctgtttgtggtgtttaatccttgtaaccattgtttcatgtatgttgatattgtctctgtaataacaatttagagaccatatcctttcatttattttgttttctttattccacttgttcattgtcagtactcattgaaagcatttgcctaattgacccagaagtatgtaatgtagtttttatccttatatgaaagataagatttatatgaaataacattaaaattaaatgctagacagaaactgctgtggaaatgtggagaagagattatctatgcataatattaaaaaatctgtgcagcaaaccaccatggcacgtgtttacctattataacaaacttgcacatcccgcacatgtacccctgaacttaaaagttgaagaaaaaaaaagaaaaaaatttaaaaatcatccaaaaactggcttttgctctattgtaagaaaaacttctataaatttctaccaaagtttcaaaaaccatttaataaattaagaaaaacatgtgctatattatacatttatacaaaaatcatagggaactttcttatgtttactcctaattcatatagattcccattgcattttaattaattttgccttacctcaactataagaattaaatcctcaatagtacataattcaaattaaaatttttagcttgaagacgaagtgatctcagtaggtctcatccaaacctatgaaacattcactcttacaactggaaggagtactagtgatcttctgtaccctgttctctttgcagataataagactgtagcccatagatgggaaacgaattgtttgggggtgcacagtgaactagtggaagagcttggcctgatatttggataatggattttgcaatgcatgaagttttaatctattgctccttgatgagtagagaactaataagaacttgctgtcctccctctgtagatcatttttgggtgaggttgcccatgtgttacaggaccagccagagggacatgtagtgttgtgttgcacctagtgttgagctcatgccatctcgtgagaggcaaatgtgtgtatctctttgtggttccatgttcagtgatgtcacactggaagcctgagcttgaccatggtgtgaacagtcacactggaacatgctacaaatcagagcatttagaaaatttttcctgagtcctgtttgaccagcacactggccaggctcttttcttctcctcttctttctcatttctcctgtattagttgttgaaaccactgatgaaggagtaagttggtgaggaagttgaaaaatagtgacttttcaataatccacagtctttggaagtctttgttgtctgtcttagcatgattcattaagaattggcactgtttagtagaaatgttgactttgaaccattatagtgagttggtcgttgatattttaggatctctaagaactgctttttacctacaggcattaatgaatgccatgacccttcaatcagtggctgcgatcacaactgcacagacaccttaaccagtttctattgttcctgtcgtcctggttacaagctcatgtctgacaagcggacttgtgttgatattgatgaatgcacagagatgccttttgtctgtagccagaagtgtgagaatgtaataggctcctacatctgtaagtgtgccccaggctacctccgagaaccagatggaaagacctgccggcaaaacagtaacatcgaaccctatctcatttttagcaaccgttactatttgagaaatttaactatagatggctatttttactccctcatcttggaaggactggacaatgttgtggcattagattttgaccgagtagagaagagattgtattggattgatacacagaggcaagtcattgagagaatgtttctgaataagacaaacaaggagacaatcataaaccacagactaccagctgcagaaagtctggctgtagactgggtttccaggtaagaaaacactgatgagctttttaaaagttaaaaattaaaaaattctaaccatgttttcatcttgataggaaattaatttttcaacttgggttaatatgcagatacatttaatgtttctgcaggtttattttctgctttgtatctgatattcaaatgatagattcagaacagaatatctaattattttaaaaatttatagtatcatttttatggaaagaggaattgcaagggaagagagttcactgttgctggccattcacttaactggagatgatatgaagggacgattcatgcattcattggtgcattcagtcgttacttcctgagtccctcctacatgcccagcgtgatgacaagcagcaggggttttgaggggaacaaggcagacatggcccttgctctcctgaagtacatagccttgcttacaatacttgtcattggccgggggcagtggctcacgcctgtaatctcagaactttgggaggctgaggtgagaggatcgcttgagcccagaagttcaagaccagcctgggcaacatggcgaaatctgtctctaaggaaaatgaaaaaaattagccaggaaaggtggtgttcgtctgtagtcccagctactcatgaggctgaggtaggaggatcccttaagcccaggagatgcaggttgcagggactgagaacatgcatggcactccagcctgagtaacagagtgagaccctttctcaaaaaaaacaaaacaaacaaaacaaaaaaaacaaccaatactagtcattcccagcatgggctgggcgtgaaaactggagaatggctaacatgagactcttgttttgagattgcccttatggaaactgacagtctttaaggcaggccagtgatattttaactaaactaccagatgaaccacacttcttaacatctctattgaatatcaaatctatcggattcttggcagcataaactaattggctttgtggtcaatagacatcaatctgcaggcactgtaaagatgtatgctgtaaagattcttgttgcagtcagcccagacctccagagggctcttccccacatccttatatttgactcccttaagggtaaagatcctaaaatgggtggggacagttggcttcccagttctccctgaccagtagctggcctgacataggtgctgagtgcttgctggataataaatgaaacgttgactaagcattcctattgtatgtatcaattcctgttttacgtatcctacatgtcaaaaagtatagtgattaatgatttccaggaacagaactgagcatggtactgttcttgtcaccatcctttgttccactgcagaaaaaataatatttgaactgtaagacattgtcattcagccctctctctcagaaactgctagaatgacgtttctcttggatttcagctatttcctctctatctcggtgtgttctttatcagaagagaattaaatacatgtgaggaagatgggcaagaaagtctgggtgagggtagggtaaacttttcttgaaagtccaggagggtgcacaaccaggctcagtgttcctgaaaacacaaaggcagaatggagcccagttacatttacattggtagggggcagttctaagatactagctacactgaaattagaaacaacttttttctccaatattaataaatatttctgctgtcagcattagggtgtttggtttccaaagcccttgcatttgatataactttttaaaccaccattacgcacattggaagatactgttggctctcagttatcttaatttttccagtagtggagacggaatatcttctccatgttttcttgagaagaatctgttcacaggatgtcttttgactgtggaataaagagaaattaatgggaaagcagtaagctcaacagagtagagtgccctatggggtagccagtctgccaggacttgaatggtaatagcaacaggaatactaatacgacaagaataataatagcaactccttctaagcctgttgtgatctgaaataatataatgttttaaaaagtccctggtctgaggcctggcatttaacaagtgttcaataattagctactattattctcactgttcttagtgtctaccatgatggaatccaagattgtagccatctcattcatcaggatttactcatttacccaagtgaattaactggcaagacttgtacatatatggatactcattctttcttgctgaagcctgaagcgatgctactgtcctaactattcagatatccagcatgaatggttaagcgcgtacttgttgcaaagaggcattcaggtcttttggaagggaaatcattctccttcattctccttccggttggaattgattatcaaatcctaaatgaccttctcactataggtgcatttaaccctttggaaggttatggatgctataagactctggtgaaagccctgggcccctttagaaagtacacagatcaccaaagctggcttccctgattctgggtaaagaccttgggttaagaacacttaccttataagaaaaataaattttattgaataaaaatacatttataacagaaatgtccttgaggtagcagtttctaacagatcctaatatgtttctaaagcttcttaggtttgattaagtgaaatgtgtctcaggttgagaaactcattttgacagcctgtctgacagaggcagggatgtctctttatcctaaggatgtcataatctttatcttaagaatgtcataattcagagtttctctgtgcagtttcaatgacacacttagacaagtgtgtttccttgactccaccatttaaactgtaattcatgatactcacctctgcttccctgttctgctaagcctttgcactgcctggagagggtgccttatgctgcatgaggaaagtaaaaccagacccgtcgaatgaagtgtgtcccccgtattttctacatgacaccaccttaaagtgggaattattgcacacagtcttgcaccctctgttgcctcactgcaggaagacaaacttcctgttttcccctgccctcatttgcctgaagaaaggtgacttctaacaactgtctgtgattctcaggtagcttgggtaggaaactgggtggctaaatatgtaccatttcacaaagtgactgtattggttaactcctggctctccattttagaaagctctactggttggatgcccgcctggatggcctctttgtctctgacctcaatggtggacaccgccgcatgctggcccagcactgtgtggatgccaacaacaccttctgctttgataatcccagaggacttgcccttcaccctcaatatgggtattgtctccctgcaatcctgggcttttctttcacctccttcttctgcctctgttaccgagaaggctgttcatgtaactatctcaaggccaatgtcttgctggggtttgtcttctgcttttcctacttggtaaattgtttagtgtaatgagtagaagcatggcttcttcaaatcatcatcatcagctcttctgttttcttttccctgacacacttttgcacttttcaagtcctgtattttggctgcatgcaaagaaaactgtggtttcagaaaaccgatttctttactggactctcgaagtcaaagccactgaaatccagttaactatgtttatttgtgagcattttctgtacattgtccccttcctttttcttttttagattatttgctgttagctctctttcttttctgaatgcagaaaagaattcagaatgcagtctgctctacagaatgcagactccatttctctaaatggagaaaaggtgtgtattttggctactgacttcttttggcatcagggactgaccctttgtgtttgccctgacaggtacctctactgggcagactggggtcaccgcgcatacattgggagagtaggcatggatggaaccaacaagtctgtgataatctccaccaagttagagtggcctaatggcatcaccattgattacaccaatgatctactctactgggcagatgcccacctgggttacatagagtacgtacatagaaaagcataaaacaattgtgtaactgtttatttcaaacatcagagcttgtgattccagtctattagtcccctctattgtctaactggcctgtctgttggaagtcattcgggggaagtcacacttctaactaaaactgctgagctctatggtatggtgcagtagaaagagggtgaacttttaaatcatatggatcagggtttatgacctgatgttttcacttcttattgtttttttatctagaaaatggggctaataatctctccccatggtagtcagctcagtgtgcaactcatcttaattttttttatctctttaatttgctctcccctatgaaatatatgattaataaattttagtatttgagaaaaggaaaagaataaaaggatctggaaaactttccctaaaatactttggcacatttatggttaagtgcagtgcagtgttttaggtggcagtagagtctgttaacattaatccaatatgataaggcatttacatctttctggtaataggataatttttaagtgtgttaaatatactgttcaataaaaaatactcattgtaaaaagatgatacacattattaatcaaaaattaaacaacaatacccatattgaattttgctagttatggcctagttggaccatagtattgtcttctgcataagcatttatggataacgatccaggaacagcctgttgcactcagaagcatggaaatgccattcattcagtagaactatttcaaatttttttattttatttttagaaattcctttcttctgttatatttattttgctgccaaagtcagtgtagtaaagtttgaagttctctaacaccatgctccctggggacatgccactgaaaaagaaggaatacctggcacacacgccagtgctctttcttcctgtgctcatggcaggcataattaatcaatccaagtactttctcttgttgaactggttcatttgctacactaaggtagcctttagcattctcattgcagaatttaccgtagcagatattaactcactcttagggtagagactaactttaattagaagcagtacaatattatttctagtttacttataccattttgatgtgatatgctgatggtaatacccttagcccttcccacagtgtgtgtatcctctcttaaaaggcacatcaaagagctgagttagctttccatataatcctatattgaattagtagaagcatcaagatgttcaaagaagcttcaacaactttctaactgacatttgttgttctttgggtcctatagattattcttggtcttgaaagcttagtaggtgtcactcagcatacatttagacagtgtttccaggagcattagagatgaaaaaaggaattttctagttacacaatattctgttcactttttgataaaatctaatatagattatttacgtagatggattataaaatttaggcagtagattttagtctaaaagtcaaatcataatatgaggcactgtgatctgggaataaaggaaactttaatattcatgagccatgttaaattggttacctcttggagaggtagcaatgcctgtgttcagaaatatatttcatagatgcataaagcaatagatttttatagagcatgcaattgattccttgtacatcttgggatgcaccaacacatcactggagctgtgcctgtagttctactcttactttttttttttgagatggaaattcgctcttgttgcccaggctgaagtgcgatggcgtgatctcggctcaccacaacctctgcctcctgggttcaagcaattcccctgtctcagcctcctgaggagctggtattacaggcgtgcaccaccacacctggctaattttgtatttttagtagagacagggtttctccatgttggtcaggctggtctcgaactcccgacctcaggtgatctgcctgcctctgcctccctaagtgttgggattacaggcgtgagccactgcacccagctgtgtagttctactcttgacaaaaagtactcatagagatatctgagatctctctacagagattacagatgaactggaagggaaggtctcaggactactttctggtctatgatttttttagaaaaacagatggtggctaggtgcagtggctcacacttatagtcccagctctttgggaggctgagcagggcagattgcatgaactcaggagttcaagaccagcttgggcaacatgacgaaaccctgtctctacaaaaattacaaaaattagctggatgtgctggcacctgcctgtcccagctactcagaagactgaggtgggaggatcacttgaacccaggaggaggaggttgcagtgagccaacattgtgcaactgtactccagcttgggcaacagagtcagactatctctagataaataaataaataaataaataaataaataaataaataaatcagatggtgactaatttctggtcatttacctgcatccttatcaacaaaggccaagcacatcttcaagttttcctatgacttttataagttaccataaattatattttgggaaatatttttaacattgcatggctaacattatcaggtttcttagttgctagcttgttctatctcctgtttgagttttaggatctgttccaaatttttaaaatattaaattttcactattttagaaatgatttctgatatagacccacagtaatgaaagcccttggaactgagaggacttgggaatttggctgtggatcctttgtaacatcttgaaatcggagaaccttctctggaggtttattcatctgtaaaagtattcgctaatggtgccatggcacgattaataataaatgtcctgctggtgtttgcaaagttaaccctgcaggcctgtaagttgtgttcccctcaggttatactgagaatgcaactatctcctagaataacgtcccctccggaatgttaatgagaaggtagaattccagtataatattgctatcttctgatttcttccaatggtgttggaagaaacaagaatggtgttcaccccaggatatcaaaagggtgcttaatgaggaacatcactataagaggccataaacctacaacagctataacagcttcatccgcaggaaagcagctgtggttaggaattagtgattatttaaactcctgacactattcctattttgttaagtattgctttttcacttctacatcttttgttcaatttgaattcatcctttaagtttaatttttgttttaattaaagactaggagttttgaggatctgaacttatattatctctaggaggtagaattttattgatttgtgaattcttttatcctgcaagacattagaggagaggaattacctttatcacataactgtttctgcttactgctgcaggtactctgatttggagggccaccatcgacacacggtgtatgatggggcactgcctcaccctttcgctattaccatttttgaagacactatttattggacagattggaatacaaggacagtggaaaagggaaacaaatatgatggatcaaatagacagacactggtgaacacaacacacagaccatttgacatccatgtgtaccatccatataggcagcccattggtgagtaggtgattgaggggtttggcaaggttgccttgggttatgtgcatgtcatgattgtctttaagcatgaacttcgtgatttacaaaaagtttgttgcacttgttagtgttttcttcaaagcatatgctgaaagttgacagtaggcaaatatctttagagtttatcccccttcccctgggaaagactacctagaactcttcatcttcttaaaactcgctcaattcttcaagatcatctttttttttttcctttgtttttgataagatttaacagttatcatgttgccatatttacttcatctatttctatgggaagactgaagtattttaaaggaattaaaaatatggcatttcagccctaaatactaaatactaaataaatgcatatgatattgtattgtgtataaattagatattattcttatcttctagaagataatgtcaagagcagtgcgttttagtgttttttaagtaagagaacttgtttttatttgattgtgaacttatattccttttatgcaattaaagcaactttatgatttagagtctgaaataaagataaaggtctgaaatatattttggggatagactggtttttgtgggtctgctttgttgtgatgtcttgctaaaacatatgataaacttggaattaaggaaaaatgagaattagcaaaataaagaaatttagtatttctttctggaagttaatattcttcatatcatttttattagaagttcaagcaaatattcacctcaaagtggtgaccaggaaaattagtaaagatgctgctcagtttattcatccacattatttttggccaaacttgttacctgtatacttagaatgagggaatgaatatagcatctgttggaaattaaaactttaacctaggtctaggcaaatgaacataagctaagtttactgcctgctttcccaggacttggagaaacacatcttttctagtcagaaacaccagtgggtatagctcacttctggtagcatataaatgagctttcttaaagcacagggttgttgcttgtataactctatcatctgttttatttaggaacttttgggaaaatcataaatctaggatagttttttttttactaagaggtgatgagtttaaagtcaagatgtgtaatcagctaatctgtgcttgatactctctttcagcaaatgaacacatattttcttccttttccactagtgagcaatccctgtggtaccaacaatggtggctgttctcatctctgcctcatcaagccaggaggaaaagggttcacttgcgagtgtccagatgacttccgcacccttcagctgagtggcagcacctactgcatgcccatgtgctccagcacccagttcctgtgcgctaacaatgaaaagtaaggctctctttcccctctcctcagtgcctctctagcccgtggacagacattgaccttcaaggctccaagggatgggagttttctagtgagacaagattttggttaattaacttggttcatgtggaacacagcaagactctcagcctccaacttcagataatattttccatgaatagaaggagcttgctaaccaaactgttatgcctatatatgcaaactttcatagaaaggaagcaaaccatatatttctcatttctaattgtcttaagtattggagccagagtgtatataagtacatactgaaaaattgtccctagaagtaatagaatttcactgtcttttccatgtctatgccggcctagctccttagctgcctatgctaggggatccagggttacacattcaaatccatttttgatcatttgtgtttgctatgaaacatggccacagattattttcttaacaatgtccacaggcccattgataactaggggacctgagttagagagtggcatggagagaggcattaatgcagatcatagcatctaagatgcagaggtagacgattgtagtgattaaataagatatctgagattaagaatctagcatacatttatcgtgagaaagaccctcaacagtttttattgccctccaacttcccaaacaatacttttatatcaccctggcagacaatctcaaccaatcactgctcctagaacacagctcaaaacacccactctttatttgtttattgttttttttttgtggaggaaatttattcatcatattaagagcacattttcagtttgtatttggatcttaagaaacctgttctatcttgccaagttatgttttctctgaaaatacaccattgtaactgagatttaattgatcctcttctagggccacgagagagctcatgcatgtcatttcttggaattcagtgttgacttcttctctccagataactgttgcccctggtgctttgctaaagaagtgctgtatgttctctgtgcaggtgcattcctatctggtggaaatgtgatggacagaaagactgctcagatggctctgatgaactggccctttgcccgcagcgcttctgccgactgggacagttccagtgcagtgacggcaactgcaccagcccgcagactttatgcaatgctcaccaaaattgccctgatgggtctgatgaagaccgtcttctttgtggtgtgttgagtcgctttatgcctctttttccgacttctatgttgattgtatacgatcatgattctgtgggtatttcctgaatatcatgaactaaaaaccagttcaaagtcctagaaggaaactcaggctccatcctttttctatttttatgaagtttttttttttttttttttagaaatcttaaggtttttacaaggcaaatggttgaagtagacaataagttgtctctactggtggctcttcaccatgtgctgggcattgaatcccctttgagagctaacattgaggaggaaacgagaggtttccacccccatttttaacagggactctcagttgtcatatttatttatgtttccatttaaaaggcaaaaaaaaaaaaaaaagactgagcacagtggctcatgcctgtaatcccaacagtttgggaggctgaggcaggtcgatcgcttgagcccaggagtccaacaccagcctaggcaacatggcaaaagcctgtctctacaaaaaatacaaaaaattagcctggcatggtggcatgtgcctgtaatcccagctacttgggaggctgcagtagaaaaatagcttgatcctggaggttgaggctgcagtgagccgagatcgtgccactgcactcacttggtctcaagaaaataaataaataatcaaataggcacaaaataaaattcccccaaactaaaaacaacacatcaataacagtaacaaacacaaagtttgaagactattttccagtaggagaatagggacagaggaaggtatgcttaacaggtcagggtgttcagttcttatctcttaagtctgtatgcaataaagagatatttaagaatttgggagacagtaatagtcaaaagaagaagtgctccatgtagtagtactgactgataagtacattaggaaataagtcctctaaaaagaaatcatgatcctgctatccaggattcactgatgtcaattaggagctttcattcttgatgccttccaagctgataaccaaatgtccctgctctcagagaatcaccactgtgactccaatgaatggcagtgcgccaacaaacgttgcatcccagaatcctggcagtgtgacacatttaacgactgtgaggataactcagatgaagacagttcccactgtgccagcaggacctgccggccgggccagtttcggtgtgctaatggccgctgcatcccgcaggcctggaagtgtgatgtggataatgattgtggagaccactcggatgagcccattgaagaatgcagtaagttcctgtgggaggaccaaggcatgaccagagcagggagacacgaggaaacttccatggggactgagagaggacatggagctttctttttcagctgatgggatgctcccccttggcactccctgcaaactctggcactgcaaggcagagtatagctgtgtggcttgcaggtggaaccagactctgtttctgaagtggctaatacctccttttgatacatagaatgtctaaccaaccagaatatgataccaagaacttatattttatatatctactgctttctcacttgagccacagagaaatgttatgaggtagggaaggtgggtgtgaaccaattccattttacagatgaggaaactgaggttcacattaagtggatggttacattactgtttagtgtcagacctaacacttcaacccaggttttttacttcaaaccctgtccttccccaaccccacccacaaagttatactgtaaaacaaatgagtggtgctgacatattgagaaaacttaggactatttttctgctcatggtaaacagatcacatctaaaacagacacatatcgccagaggcggtttgcttggtaacatggtcattgttattcctcagtaccacaacctcaatgtgacaatggaaaggtgctttcttgtaccttcagttctgactttgatgcctcctcccttttcagtgagctctgcccatctctgtgacaacttcacagaattcagctgcaaaacaaattaccgctgcatcccaaagtgggccgtgtgcaatggtgtagatgactgcagggacaacagtgatgagcaaggctgtggtaggaggggccacaggggagtggagggagggacaagaaagtgcacatgtcaagtgccatttattagatgagagatgagagtgtatttcccatgtcatcttttctttgtttacctctgtaaaaaaatggttgattcttctaataacatgttacatttttgtagcattttgcagggttaccaggggtatttaatttgtagcactttaagtcatgctgtcattgaggaagacgttattaagatgttagaaacttgtgtaatttcttccaaatgtagaatccttattcatacttgacaagtttaaattgtttctctaattttataaattggttgaaattggtggaaaggggttagagaaaagacttcgtatctatctctaaaaaggatatttccaaattaggatatttcttatttggggattttcatattctgaatgtctctctgattttccctgttatctattggacatctgtagtctctctggtaacatgggaaagccagataaattaatggaatttgtcaagattagtcatagtctaacttgaaaccaaagcatctggagtatgtgtgttgggtttagttggaagagaagtaaggaagatactaaattcttttaagaacactgagtccaattgactgaagataatatgatcaaaatatttatttattatggcatcattttagcctcccataccaggcctttgttgcaaattacaaaccagataccatttcattctttgcatggtttctaccaatgggaatggatcgagtttcaagtggtaggataggctcagggtagctaaaagagggaatgttgaccatgaatgttgctggcattcctctctttgggagcttcaagagtgagctaatacaattctcagactgtctcacaaggaagccaatactactttgtgcatttctctgccaatggtttatgaagtctttgcaatgactgctttgcagaggagaggacatgccatcctgtgggggatttccgctgtaaaaatcaccactgcatccctcttcgttggcagtgtgatgggcaaaatgactgtggagataactcagatgaggaaaactgtggtgagtgttcacagtcctatggtccttatataccaccagagctgtgatgtttgctttttgtccataattcaactgtctatgtcattgatcctcaatgggtaggatgatatcaagctgtctgatctctttctttctgctggtcagtacatttctactttctcttccactaaagacataagcatctccttctgagatgtttcaaatcaagcttttggaggaaggtatttactgaagaatatcttttatgtgttgaatttatttacatccaacttttttttccaaaagaagttgaggtgacttatgataaaggaaaaatgtaataagataaatagaatagaaatagaaaaccaggaccagagaagtagagggaggaagggtgctaacccagagacactgcttcttaagctctttccccaaaatggccttcataggagaggagagagaacttgtgtttgcattattacccttcctagaatagttgactattttaggagggctaacagttaattaacaggacaggttttagtttctctctcccagtcgaaggtattgactacaaggcattggatagggaggttgaggaaaggaagccaagaggctgagatcatatcaaattagatggtcagaacacactcaatgtgtgttctgaaaacaagcttaatgaagccctgcccagagtgtatatcactgacccatgatatgcgtcaatttctaattgactaatgaaacacattctaactttgtttaccttttggaagaaaaaagtgatcaccacttgcgataagcaatgagagatttaggaagctgactacacctgcaaatatcagttagctaaaaacttatacaaaagggtaatccaattggcattttgtcttttattaataaaagtcaatgttgaatcctataagaggttatctagagtttcacgaaatagaaaaaattaagataaaatcaagctgggcatggtggaacacacctgcagtcccagctacgcaggagcctgagcagggaggattactttagaccaggagttcaaagtcagcctgggcaatgttgaaagatcctgtttcaaaaaaaaaaaaaaaaaaaaaaacagagagagagagcaagagagaaagagagatcagatcacctttggacaaacttcttaataaaggccattctttacagactcaaaattaaggtgaaaggtctagttttggagggtgaatgatttgcccaagcacacctctggggcttgggacacaggagggtgctgggcacccagggcactatggtcagctcacaagatgtctcctgtatgtgattcctggtgcacactcatggccaggtgcctttcctttccagctccccgggagtgcacagagagcgagtttcgatgtgtcaatcagcagtgcattccctcgcgatggatctgtgaccattacaacgactgtggggacaactcagatgaacgggactgtggtaactgtcatttgagaagcttaccatagaattttgtactgtgacagtgtaggggcttcaaattagtgtttataaggcttttagaggaaaattatttttgtatatgtgtaatatgtaaaccttagcataacacagtatcttctgctctgtattttctatgcattattcttaactcatagcagtctagattagtcataattgaggaaaatagcaaggaattttaaacatttaattttaatatcaacacttcttaggagcagattttaatctgcgttagccttgtaaacaaagacattgatcttgctactattccacggaaagtcaccctaaggaatatgcatgtgctcctatgactctcttgtgtagagatcagatcattgacagagtaatcctaaacccaaagtaatttttatagctctttactgatttggtgttgggtcttaggaaaattagaaaacattgaagattggggaattccgatttctgaggaaaagcttaagagctggagattatttaatattagggagctaggtacttccatctctgtatgttgagtggggaaagtgtgagttttgagaatgtattaatttgctaaccacaagttgtgggtttgctgtgagccagtcacagggtgtagataggaatgtgatggagtaaccactatactccaggtacctaatatctgtctgaaaatgacaaggccttctcggaatgacaatcttttctcttcagagatgaggacctgccatcctgaatattttcagtgtacaagtggacattgtgtacacagtgaactgaaatgcgatggatccgctgactgtttggatgcgtctgatgaagctgattgtcgtaagtccctagacacatatgtagtactgcttacctgagagcatggatatgatagtttagacatcagtccgctgccgcttcttagattaaaaggccataagtattgtctgttcagcatgcactgataatgatcagttcacctgagttctaagtcatcataatcatacatttcacaatggccgttcaagtgtacttccttgctattttaaatggagaatatattaagtaatctgtgctaacaaagtatttatatattatcagctactatacaaatcattaattagataaaaaacatttcaggtaaaaaaatattcaagcaacgaatacattagtataaagaacttgggttgggtattcgaacatattgaatttatagcattaaaatttttctcagtcacacgatggagtataaaaatgattaaaacttgaagggggccagcccctccacacctgtaggtatttctcctcaggtgggatgagagactgagaagactgagagagatcaaaatggagtttcttatgtcttccttttctacatagacacagtaactgtctgatctttcttttccctacaaaaactggaaagccaacatgattactcagatttgagtctttatggatcacttgaatcaatgcaaactgtttatacatcattattgctgatccatcaacaataaccatcatccatgataaccatccatgatggttatcgttgatgatgtggttgccaaagagactttataaatgtatgtgggtaaaaccagtcttgacatttgcctgtagagattaagtccagtgctgtccatgccatggatgattcatgccattggaaactgactgggctctgacaactgcccttaagacatagtccgttcaactttcagacaggtcaaggccactatacatcttgatgaataaagaagagcaggctataatggcaagagccaaaggagaaatagcaggaagcttccccaaagtagtcaatttgtataataatttgaatatgtttttttcccccatggcagccacacgctttcctgatggtgcatactgccaggctactatgttcgaatgcaaaaaccatgtttgtatcccgccatattggaaatgtgatggcgatgatgactgtggcgatggttcagatgaagaacttcacctgtgctgtaagagggagagaaacggagtgaatgggagtggtgttgtctgtcaaatctcattgtttcttacgtgtagcatgtgagcctggagagcagttgtacaattgtttaggaatggacacaggatcagcgttggtgttatttcactgggtcttccagcttcagttctctctgtaacctgagaaagttgggaaaacctccatgtttttaaatgtattatggccttagaaaacaatgtctttaagggaaatgttgcttgaaaacctagtatgcataaataaaggcaggtctgttgtggttgaagtctgaggaagggtagggaggaggctgtacctctcctgctgtatcctactttgggtgcccctgaagtaccctctccaaacccctagagcttcctggagcacctttagaaaatgctaagactttcttaatctttacagtcacttccttttaacatggtaattcaaggccatctaattccctcttgctgaatgatgcatatatatatatatatatatatatatattttaaaccctgcttgtttgtgagtctcaattcaggtacatgtcagtagcagaggaggaggggtatttcaaaatcacatgccctggcctcaccctaggcttagacctgatggagcagaatctccaagaatgaagcctgcacatacgtatttttaaaaggcttcttagccttttagtttagtcccctggttgagaactactgattttaatgaagtgaacgtaaatagagtttgttgcagtcattttgctacatgctttgagtcattggaggaactctagggtaatagttctcaaaagtgtcttacctggactaggaatgtcagtgccacttgggaatatgttagaaatgcaaattcatgggatgcaccctatccaaatagaaattaaaaatcaagaccaaaagaagtagaggaaggaaaggcattaactcaaagaccctgctttttgagctctttccccaaagtggccttaattttgtgggaaaattaagggcccagcaatctatacattaacaggcccctcaaatgattctgatgcaaactaaagtgtcaggattttgtgtaagtaaaagcccttaacctaggagacaagacctggagaagcactcctgttggaagttcacgttgcatcttccatcccctttcccagcttcatcactactcatttttagcccagagatttgacttgtgaagatgatatatcttagtattttgtttctcctcagaaaactttaattagtgttcattatatttcacagttgcatcccaacatttttctttacttgttaggaactagccttgttttgctttgaacttcatgaatcttgagacacatcttagacatgtttaactttcaaagaagtccttaggaaatctcttctctccataaggtaaaatgcccatagctagtaaaaataaactttggagagtcagagacacagctacattaaaaggtttccaatactgttttataatattgaacttgcctttcacagcaaataattattgcaatagttctattaacaatacttccaagaatcagcccttagatctgaccctttcccctcaaccaatcttattataagtctctcctcttgatccctgtgtgtgataccaaggcggaaggaaaatcagacagcccaaatcctccatgtgaaagacagaccacatgtgaagaccacatgtatgttgagttcactgcatttgtggtacacgcatagtgaaccatgttccctgtaccaaacaagtaggggacctggggactacccttgagttcctcacatctgtacaggcagcagctagaggtctcactctggacagcaagtgtgtcagggtttgattgtgagatatcgattttaaatgtaagaggtgagggaattcaggaaggaaaatccaacacaatttaaagcttcaataaaagactcatgcggtagagactctatgacaactgccatcaggaggatcaaacaaatggcttcctggctgttaggataagagtccatgtactgccagtctgtccagcctcacagccaccattgtgctccacgatccatgctccagccaccgaggcctttattcaggtccagagacctgccatcctcctctctgactcagaatctatgggaagtttcttccaagccttcctctccctaacttaagtcagatcaccccagtagatgtttcatagttgtaattgaatggttaatttgaaaagcctgtttctctactagaatgaaagttccatgaggacaaggactgtgtctttcttgtttcccatcatatctactgcctagcacagtgccttggtgtgtactatacatgtaaggtgtatctgctgattgattaatcaaatgagtaaatgagtgcatgaatgaagcaagcctggtgctgacactggagtattttagatattgacacttagattctactgttaacttgtaatttcatttttctatctttcctttcagtggatgttccctgtaattcaccaaaccgtttccggtgtgacaacaatcgctgcatttatagtcatgaggtgtgcaatggtgtggatgactgtggagatggaactgatgagacagaggagcactgtaagcaaaagtcaaaagggagaaggaaaaaggaaggaccccaagtggtctgcagtttggaaaatgtgcctctgggatttcagtttgttctatagagttgtgcccatgactgcagatctctgctgacataattgtttacaagaccatgcaaacacatgcattgcttacatgtaaccctgcctgtttcttcctgtctcatttgagcatgatgctggcaaatccattaatttttcagtctttgtttgaacatttaataagccttcccctcctcttttctcataagaaactgagaacaaacactaaatactgattgagccacacctcgcaaattaatagtttattttttcaaatatgagatttgatcatccttcagccttcaggagttgctaattgctaatctaggcaggtgcccagctgcagagatcatgtgaagcaaggcagcactggtgttaacagagcttatctaatatccttgttgaaaatgaaagttcatttcccagaagagaaaagtgatagattagtttaagatagaagttccaaactggctgcatttaacaatcgaggcattgaaatagctgtactttttctgcactttcaaaatgttttaaaatctatccattgaaggggaaagttgaccaattttctgggcaatttaatttgcctagaaaatgtcagtgaggaaaatcatttccccgactccaattatttttttccccaaaaagacattatctgggaaaattaagataaatgcctgatttctccactttctatttcttgtattgatgtggtcttagaacgctttgccacagaatgcttacttccagcccccatcccagaggagactgtcagggaggactttgacactaccacaaccttcaagttcgtattcctgttatcattattactggcagagatagcattaatacattatagcattaatatgtttatttgaggcatagcgcaaaagcatgaaagcccagaaataaaatatttttaaagaatttgagcagatttcccccttccccaaaatctctttccatttcccctgctaaaaatgccattttttaaaaaatggagcaagacatttgtagcacatggtcaaatcccagagtggaaaaaagaatccataaacttctattcttttcaaggaacagggttttagtctgggagaccactaccagtcaccacaggaagcaacctgcaacatttcaatggcttaaaatggcaaaggttcatttcttgctcatgtaaagtttaatgacagtcaagcaaccctcctccatcccataattatgccatcagggacacattcaaggttgccaaggcaggagaagatcaacatggtggaggcacacagcttcttaacttcctgagcctggaaatgacagacatcctcttgctcatagtccattggtcagaaccagtcacgtggccctgctctaactgtaagggagactggaaaatgcaagaatatgcattctcatacaatttacccttgtgtcactaaatactcctttatgattttcttctcacacacagaacacccttaaccccttcccaagggacatagctcatagtccattccgaaactgaaatccaggacctctgggtaatgggcagtagccactcaatcagttccagatgtggttcctcttggttgggagacccataaactaataaacaatcagtgccttctgtgcctgataggtattggcggaacaggggcaacacaatagaaataaacactcccattggaaagaaagaattggagactcatggccatcaccaatgtatagcaattctgaagtcccactgggctgggatgacacatgttagcacaggacagtcctgattcatgtctgctgccccagtggaattatgaatagcaccaccttcactttcaaaagcacactggcttggaaaggagagtaaattacatggccactctgggcagacattgtaaaggtcccttctttggggagtggagggtatttattgattagctcatgcctctgctctgggaggagctcctgtgttaaaatgtctctcactgtttctgactctaccctttgagagttttttcttgtctattttcctctgcaaatgaagagggaaagggaaatatgctaccattagggccagcacggcagctttctcaccccacttcttgcttatagaaggtcgggagcccaggagttgttttttgtttttttttccaagtctcaaacagtcatagtattttggtttatttggttatatctttctctcagaaacataccaggcatttgatctgtttgcttctagcctgttctaaaagttagtaacctgacctagtgctcttttggagacatagttctcaaatctgcttttttctttgctttctttccttcatagagttctgtctgaacttattgtcacttacatccaatccatgtagaaaaatagatgggcagtcattttatccaatgaggaggttttattgggccttcgtgtctcacagccttttaaacttcagacttttactgtttgggatgtagatacaggtggcttttctcacacagcaaatttctgggctttattttatttctgcttgtaaggtaaccagttcttcccttaggttctctctttcttatactatcttgccaaactcaggaatggcaatcaatgcacattactaacattctatcttctaacctcgctccatgattgacaggttcagtaagcatgtgatctgccttccagtttttccgaggtgatagctttatcaaatgctttgactttgcataacatgatctccacctttcctgcctccactatcagtgtccttgttgcttgcctcctgactgttaatccaatgccaaatattttatgtttttattatggcagtactctacttccctcatcactctatgttattcggagtaattaatactagctgttgcaaccagcatatcctgaaatctcaggggtgtaacataatgaagccttattgagcactcataaaggccaacgctggtttcacagccctcctgcatcttgcagctgtgctgcctggaacacatggcttccaaggttgctgcagcagcacaggagacacggaggaggcacgtgtgcttttcattgcttcagcccagtagtgacacatggcacctccaactgacagtacgttggctagaactggtcacatggtcctaacccagctgcaagggagactgggaaatgtagggaagcacttgtttatttggtaagcacaaactgtctctgtcaaagaaggaagtatcttgcttcataaaagaaaaagttttgattttaacttgtttttacattgcaggtagaaaaccgacccctaaaccttgtacagaatatgaatataagtgtggcaatgggcattgcattccacatgacaatgtgtgtgatgatgccgatgactgtggtgactggtccgatgaactgggttgcagtaagtaaacacttgtttttatagttcattgtagtaactcaggtttacctaattaaaacatgcaataacataatgtagacactgaccacattttctccttaatgtactttttgcttgaattccagtcaagcccatagctagctgtgactgagtgcttatcctagaccagacattgtgtcaaacattctacatgcctggtagcaatcttatgagttagatgttattatctctttcttatgtacaaatgagcaacgaacttagaggttaaacgaattggccaggtcttactgtcattaagaggttgactcaggatttgaactctggtctgtttcactgcagagcaagtcctcttcccagtccactgggtgcctcttagcactttaaggctacatattttgtttattagtctgcacattatggtgggaggatgggggagggatagcattaggagaaatacctaatgtaaatgatgagttaatgggtgcagcaagccaacatggcacatgcatacatatgtaacaaacctgcacgttgtgcacatgtaccctggaacttaaagtatatacatgaaaaaaatcttaagccaaatgcagtatccttggtacctgaaaatccttctgagggtgtttgatcaagaagggaacgccacaggggacctgggaagggacatttatttttatttttaaagttgagggagtggctggatgcagtggctcatgcctgtaatcccaacactttgggaggccgaggcagacaaatctcttgagcccaggagttcaggaacagcctgggcagcatggcgaaactccgtcttaacaaaatacacaaaaatttgctgggtgtagtggtgtgcacctctagtcccagatactcaagaggatgaggtggaaggatggcttgagtgcaggtaggggctgcagtgagctgtgattgtgccactgtactccagcctgggcaataaagcaagaccttgtctcaaaacaaacaaacaaacaaacaatcaaacaaaaaagaaagtagagggagcactttgtgtaggaaaaggatgatgaacataaccaaggaacaattctagctcaatattttgatggaaatgttaaaatgacatgttactaagtcacacctttgtagtccatttatgactcataaagtgctttcacatacattatttaatgtgttactcaagttagccccattgagttgctgttattgtctatgtaataaagctcagagagcttaagtaacttccttgtggtcacacagaatgtcagaggcagaattggagcagtcatgtaagtccaggttaggagggctggcctctggatccctgccactagctgtgccactttgggcacatactgacctctccagtctttggtttcctcacaggaaaaaggaggcccttctccaaactctaggagcctgtgacttagtcatcctagtgagctccatgtgctttcaacttcttgggctctaattgactttttcctgaggcatccaaaggattttctatcaatttttctcctgcgtgagttacgaagaggtatgaataaccagccatattgagttggcttgccatttatttcacatacgttttctgtgggacttggagttattgacagaatgaagtgacttgataaaatattttaaaagcctgaacatgatagaatttgcaaaactgaatggcaggtttgggttctgactcccagagactgataggtggcttaaaatagactacagtactttcttttcaaatggcatttaattagtagcaggtttttttttttttaaggaaataagtagcacaaacaattcgggtatggaagcagcttctcttttcagatattaagtgaatatgtgacatggaattcagtcttatttctctggactaataatttgaggcatagaattcttttttaatatactagttcttgggtgctgttaatttatttgcctttgtcttttttctccttcctcctcttctccttcttcttcttccttctcctcctcctccttcatcttcttcttctccaaaagcatcactgaagtgtttaagacacattgttcgattttttaaaattgaaggtatacaacatgacattttgatgtacttatatatagtgatgtgttataatcaagcaaattaacatatccgttatctcacatagttatctttaaaaaaattatttttgtggtaagagcacctaaagtctactgtcttggcaaatttttgggaatgaaaatacattagcattttttctagcaccattcaggtataaaggaaagaaattaacctcaggttgcaaatattatttatgtgatcataaagatagattgacttgctgtttctctggtagttcttattccttcttcataaaatggaaagtagggtatttcttttataaatagagtgccatatgtttgggtttggggaaatcagttatacgggttaaaatggtgatcattttcaaatgaaaacaatgataagaaagccctcacattttaggaagaatcctacagtgtcgtgtggtttctgctcttgttaaggactcttgcttcacaaaagggtgactcatttagtggatcacttggtccagaaattcttgactcctgggacccctaatccctttatagatttcagagctaggaggaaattacaaagtctagtgatgcatgtgagacccatggaggttatgtgactggctcaatgatatccaagttaataaacataggtcagattcatttagcaatgtagaggggatatcactgctaatctcacagaaattcaaaggacagtaaggaaatactatgacaaattttatggcaataaatcaaacaacttacgtgaagtgaataaattcttagaaagacacaaaactctgaaaatggctcatgaaaaaaatagaaaatctaaatagatgttttaacaatgtacagttgttaagagctcctataataaaggctaggatctttattataagactttcatgcatacagctttgaagtctgcactccaagggcagcattccattgaatttcattgtactttattttggttatttttctttttgaaacccagtgttcttaatgtactcagaccacatatagtgatatgatcatttaccctaaaggactctgagagtgattaagttcacctcattgcatactatggaaaacagatagatataaatctattttgatttgaaagaattaaatcaggagataccacagtctctttggctaaaatactcagaagcctatgaccaggagactttttatttgagaggtagatgaagcttaaatccttaatggagataaccactgcctctctttcccccattatcactcactatctatgttcatcttcgccagtttttctgtaagacctaggtttggggatagatggaggataaaagaagcaaactgataagaatgacaaggatgaaagccagatggcttggatagatattggtagagacaagatcttggggcaatgatgaacaatgaagtgttagggtaaagtgtgagctgttaaaagtctgtcttggaacatctggatcagaataacagggatcatttatatgggctctacaaaaataaactgtgttttttttgttttttttttactgtgaaagttcaataacaatcaaaagtaaaaatcatttgaatcccatcactaaaagagaactaacctttaaagtttggtgtacttttgctatcttttttttgcatatgtatatgtaagaaatatttcttagtattttgaaaaattaagaaatattctatactaaatggagtttttcagtctttttttcaatttattataggtatttcccatgtcaaagtatcatttgaaactataaattttaataatcacatagcaattcatcatgtagataatcataacttattgcttctaagatgtatttttttatattttaacatctttgaaaccaagatatatatcttacaattaataacatgtcagcgtaagttccagacatattcaattttagtgttacataaagtaatggtgcatcattaatgtcttagtttttttatactataacataatttattccctatcactgaacatacattcaagttgtttacaaacaaatgttcttattgtaaatatttttataatccttaaacgtaaattatactgcatattccttctcaagggaaaattcattaacatggaataactgggtaaaagagtatgaatatttttaaagtccttggtgcatacatacatagtacaaaatttctttccttgtgtactaatttatggctctaagagcagttgtatgatttagaactctatgtattttactgcaccctggtcaacacttgatatacatgtatatatttgtgtgtgtgtgtgtgtgtgtgtgtgtgtgtgtgtgtatataatcaattggtcaatgttagggaaattatagtcttcttaaaattttataatttcctcctatttgtaactttgttctaacctatctgtatccatgtcttttatttatttatttatttatttatttatttatttatttatttctatctgttatctatctatcgatctatcatctatctctctatctatctattgatctatctatttgcaataggattaaagatagtagagcaggtggtaatagctgtagagtgtcaggcttcatagttgtgcagtccagaattggatgctctgaggataagcctaggagtgctgcatataatgtgaaaattgcctcaaagttttagcattatatgcatttatctaaatggtattcagatcacgatcagaaataggaatcctgactcccccagtgccctctgtcctctccaaggcttatggaaaggggttatctcaagatgtcctatagttggttacgagtaggtgcttcttttgatacaccacttgactgttatttgtggctgatctggtttgtaatgctgggattttgtttttcagataaaggaaaagaaagaacatgtgctgaaaatatatgcgagcaaaattgtacccaattaaatgaaggaggatttatctgctcctgtacagctgggttcgaaaccaatgtttttgacagaacctcctgtctaggtagagtatattttttccaattcctgtttaggtgaactttacatctaaggttctccacccactcccctttgttaaataaatcactatttaattcccttaatggtaccatactcatggtttcatggttctaggtcattaaactactcaagaattgctttcccccacctgcatgcatgctatctgaccagtgcctacctgagtgcttgtcagatactgtgtgctcagtagagtctgtggaattgatatgaatgatgaaggccttggtgatgatggctgcttattgcaccagtgtgtgaaatcaaagttaatttaaaaaacaaactaggcttactttcttcattgtaagtcaaacaaccaacacgtatttattatacacctacttacgccagacatagatgagttgtaaggtatggagtcagaaggtagcttatcaagatggtgagtgatgagcatgattttaggtgccttttagtatttgaatttactgtttctaattcatgatatgtcatagtcagaagattgtaagagttccttttggacttgaagcttaagaactcaattgaaaaactaaatcaatgactcctgttcctgaagctggttagcagaagtgaagagacaccgaacaatacaacacaacatatgccttctgaaagggaaaatgtgctctgctattgcagagtcatagagtttaaatcctgtctccattgcttatcagctttgggactgtgggcttaatcgtccatacctcttaaagtcttttggcaagactaaacgaggaaaatatttgaaaagcatgtgaaacagtatctgaaacttagtgtttcacaaatgtttgtatcattgcttattttcatctgtacccttctcggtcctcattgctggtgaatatgggtttaaacagaagcaagatctctaaggaatggatgggaacagatgttgcgtatttggttttattttgcctacagatatcaatgaatgtgaacaatttgggacttgtccccagcactgcagaaataccaaaggaagttatgagtgtgtctgtgctgatggcttcacgtctatgagtgaccgccctggaaaacgatgtgcagctgagggtatgatgggttcatgttgggattaattgacttttggggaaataaatactgctaagtacactatacgatgaaagaaacttcagcttctcatagtttttcttttctttctttttttttaaactcgccagctgcttctcttccaacacctctttagtcgctccttctctctcctcccctgccagcttaaaacaatagctacatcccccaacaaatatgtagcaattaaaacaagagccaggtgttacttattataatggatttagcctcttgtctaccttgataaaaacttcaaaaagtggacaagatgtcatctttcttaaggctcaaacaataacaaaagcttgcctatgggatggtcatcaataaaaggaaggtaacaaggccctctagctcccactccactgagaataagatttgaggcccagtagtccaagagggctcgtgaattggggcaaatcaaggacatatcccttttgtattgttcatggactactgatcacaggcagaaaggagtctggcacagtcataacttcaatcatgagttttacgttttaggttgatgccagtgtctgacaatcgggcctaataaaacagagaaagaatgtaagtcagatgtattatactccaaattccagaggcctgatctaaatcatcatatcctagttaagaggcatgggtctttattttgaatttgaagtttgtactagagtttaaggaacttgataagaaaatagcactttattttgtaaattaagagtaaatggccaaaatggctgttcaatttcttcatacaaattgagcttttaaagcatacatttgactagcatacttacatattttaccctcaaaacactgttgacagtgaatgaaaactagagtgaaagcatttgaacagttggtctggtaattaagcagcaattttttaaatgtttaaatcctttaactaaggacatgactgaaacaaattggaatattcatataaaacataatgtcaagatagaggaaatatataaaatgaacttttaaaagttacttaaattggattcagttgacattatgcaagtaaattaaacttaacaaattctagacagtgcatcttgggatgagtcaccattaagtagctgctttaggttaaaaaaattaaatcaaggacaagctaggtttattttgtcattagctaggagctaaattgggtcatagagctgattacctgctaaaaagaatcataaaatctgtcaggaaacagtaaggaatgagacttttctggtaaacttttagtaagactataaaagtatttcttctgtgagatagaatgtctgcagtctagtctgttttgatgtcagtaaataaaaacaattcagtgaaaatgaggactgtacgtagggttctcagtctagctttgttccatactaccactgagtacaaagaataaagaactgataatgtccctaagagacatattagctttccacttgaagtggagaatgtcaagtcacggattttgtaacccagttggagagtcagctttattgattaacagagatagtcagattcctataaaaactcatgttctttaaaaaggggacaggtacatactgtgcattttatatcctactttatataggaaagtataattcaaacagataaagtagccctttgtttgtttacaggtagctctcctttgttgctactgcctgacaatgtccgaattcgaaaatataatctctcatctgagaggttctcagagtatcttcaagatgaggaatatatccaagctgttgattatgattgggatcccaaggacataggcctcagtgagtataaactttggcatctttcattgatattaagtgactttatagaattttaaggtgttgacttttaaggaatttattgtttaatgagtgaattttgttgcattagtggaggaggaaactcttccaatccagcatgctcctgatgccttagcgtggccttgaatcccagccaagctttcctgatttctttctaaaactcctccgatcactggggtttatcctttctggaccatctcacatcttcttgtattttgaaatttccttgtccttgatactgcagatcttgttccttcctaccattgtacaccttgaaaatttctactcagacctcaaagacccagtttaatgtcaccacctctgtgacaacttctatcactccttctggcagagttctatgattgctcaccatgaatctatgtcattttatggcacatgttactctaagttatatagctagttgaccacataatatctttctatcctctagacatctgctttttggggacaaagactgaatctaatttatctctaaatgcctagcagctgacccaacatctagtacactctatgtggtaggtgatcaaaaaatttagttgaatgaaggaaaaagatgaataatgcttattgttgaatctctcatggctctatctggtgttgggggagatgacagtagggtaggagtcagaaaacttgtcttctgtgcctgtaaacttatcttttatgccagtctcccttatctactagctttgtgatcctaaataattgtaacgattctctgaatctcaattttttttctacaaaatcaaagtagtaatcttgttctgtctgcttacctctgagagttgtttggaagattgaatgagatagtagatatgaaaggctttgaaaactatcaataactataccaatgtaggatttattattggtgtattttcacacatattcatgcaatacaatacacttttcaagaatggtgcatacctaggaaagcagcaggtgtccagtgcatccctctacagtcacagtcttcctatgcttttaacatgcctgctgtccaccatccttctgtctgtatataaaataggacttctcgttgacatggcttctttattgcctctgatcttgagtatgctttcaaattctcaacagcctgccctggtttatctctatacattctgttttggaaactagaacttgatcctaataagagtaaataagcactttgttgaaatacgtttaaatgaatcacttttaaatagagatgactaaatctcactaagttctcagttgaagcatttgtagctcatagctcaagtttgataggttttaaagtttgattatactgatgtcattgaattattcatattataacaacagtgaggagggaggtagagatgtcaataaacgaacagtacttcacctgattagacccctgttcttcctttacttgatgctcttgacatgaaactgacctgtgtgtcttcctctgtaggtgttgtgtattacactgtgcgaggggagggctctaggtttggtgctatcaaacgtgcctacatccccaactttgaatccggccgcaataatcttgtgcaggaagttgacctgaaactgaaatacgtaatgcagccagatggaatagcagtggactgggttggaaggtaaatttgccatacattccccccttacctgttctgttttcctggttagagttctctactgcactccatgggccatgagtgagtctgggcctggatatgagtacactcagccatgggtgcagctgggcagtggttgggcttgctgaagccccagcaactacctccacttaccccagcatgtcatggagacattatcatatcctgtattctttgtgggccatgaaaaaaattgggaaagcacccaggtcaatatctggatatagatattatatctaggatataatagtgaatattatatttactataagtgaatagcattcttgccaacagagttctggattccaaaattaactttcagtatggcagcactgctcattttgtgaagaaatgggacagcctcacaattctcccagcaaagcagttgagatgaaactttttttctatggtagttatcttggggacgaacaatccacatcttgtgtttttagcaggcttctagttaaaacagattggaaatttgactaaagaagtctttggaattgagttaatagaggtgtcagtctcttctgttcttctagaccttctagtggcccagggaccagagccacacattttggatggtttttaagtagaacttaagtagggttatcatcaggtaggtgtgtgaggtacaaatggatgtggagaagttagtaagctcattcttcaaggaagaggtttgcactgacttacattggtgggaaaatgattccttgaaaatgaaccaataatgcaaacatgtttgagggggaaggttcaggagacactactctcctggagaatggatagttattttcagtgtaaattctttttcaccttttaaaaaatgtggctggtgttcctggaagagcatctttgaagaagctaattgggtcccgctgtgcctgcaggctaacaggagactcattttagcattttcagtcaagaaacagggccttagagtactgttgctagagtcaggaactcaaaactccagacattaacactctcttctgaaaaccaaccagggaatggcagatctgtcttcttgtttgaagttttacctctttctcagccttaatgaataagagaattaagaaagtggtggaactttttctgcttgtaagagactgagacctgcagcctcagaagtggaaataaggcaggacagtcttgccgagtttgttattttaaaaggctgtttccactcatctttgagctgacaccaggttcctattgattctaacggggctctttcctgaggaggaaacagactcatgggcagtcagagttaaggcaccagccccaccgtgccttatgacttctacctagaagcccatgtctcataataatgccagtcagaggccagtctgactgctgtgtctatggtagttatcttggggacgagcaatccacatcttgtgtatttagcaggcttgtagttaaaacagattggaaatttgactttcctgtttagtctttggaattgagttaattccattgtggatcctgcgtgattcaggtgctttggctgttgggcaggagtcccctcaattccttactcttccaagtgtaacctgccaaacatgtccccttggctgtagttcccccaagagagggggactatggtctgatgataggtatctgagcagctgtctcaccagccaaacgaaatgctctcatcttcaaacctcttacccagtaatgattactctaggctttgcagttgtttaactttgtccctctgaattcaggcatatttactggtcagatgtcaagaataaacgcattgaggtggctaaacttgatggaaggtacagaaagtggctgatttccactgacctggaccaaccagctgctattgctgtgaatcccaaactagggtaagtacttggagaagtcttcaacatctagatatttctccctggattctcatcaaattccatgtttcttataatttttttttcctagtttaactgaaattgtccttcaagtttttgggagtagcgtctatgactgtttcaagaattataacatgcccttgagatcatatagaaccaaccatttctgatggggaaattcctttagaacacatctgagaatctttctagttacatggattccttgccaaatcagagctctgaactctaaagttctttgtggatataactgttttaagtgaaggtttcaacagaattgtttttcctttcatttggatgttttaaagtaactcattcattgaaatccagctagggatttggtcatatttcatttaaaaattaaacatttatatccaaaatatataaatatttaaaatgacacatgtataaatatatattatccatttgtataaatattccaatttgcaatttatctataaatcatctcagtgtaaatgagaacaagttttgttatttttctctacatttcaagacatttatttgaataatcactaagctgaaatgacttggtatttacatattagcttagcttcagaatagtgacactttaaaaaagttttttgaatgaccccaaataattttcctacttgggcaggaccagtctagccctctgtagatatgccagtatttgtaggtagaaccctatgagctgttattactttaattctgttatatttcatatgttaaatcataccctcagaaactcagcaatgaaatatgaaaaatacttgactgatgagattaacctgtagtgaggacttgtcctcagcattagtcattgctgcttatatcttatctacacaatatattaggagcaaagagatgcagtgtgttctatggtgtgaatgatgtgactgtttccagtgtgccgtttaattttttcctctgtaactaatgtttaaattcatctgatattattatcatactctgatatccctccactgtttttttcatagaaattcttttttttttttaatttttttggagatggagtgttgctctgttgcccaggctggagtgcagtggcatgatctcggctcactgcaacctctgtctccaagattcaagtgattctcctgcctcagcctcctggcagctgggattataggcacccaccaccacactgggctaatttttgtattttcagtagagacagggtttcaccatgttgggcagcctggtcttgaactcctgacctcaggtgatccatctgcctcgccctcccagtgtgctgggattacaggtgtgagccaccacacctggccagaaattcttattttagtctttgtaattcctttctctctggaatggctcagtgtagtcctgtgagggataggaagtaagaaaggagtgagaaagggtttcactgcctaaggcctgcagacccgacctacaacctcctcatttcatgatccatttgaaaggctcatcatccataagttttataagcataagcatatatgatgtgttgaaccttcttacagcttctgcggtataagatctgccagtgggtccaaaggatgatgaagatgataactactgataataccagcaacagcaatgagaagtgccaacatttattctattcttgctgtgtgccagctactctgctaagtgtcctacatatataaactcatttgaattgtacaaaggatctataaattagtcataggtttctatcccttatttacatagatgggtaaaataacaccatgctccttcagacagcaactgttgactataatataagatacaaagggagaattgtcatgaggacactgctgaaaaacactgtgatagttctcctaccttacaagggttcagggaagctctatggagaaagtagcactgaactgaatgttgaaggttgggatccactggtagtataaccagtgataaagtatgtgacatgtgaggtcaatgtgggtgagagtgagaagggccacttcccagagaaagtgggactgacatagaacctagatggatgtcttgggtactgataggcaaaggagccaggccggctgttcagaagctcaggcaatagcataaacgaagtcatggaggaaacaaaaatcattctgtgtaccttttgtgtgttttttccattccattccctacgttttgttttttttagttttgagtatttaatactttttaatttaaattaaattgaattaattaatttacttatatagacagggtcttgctctgtcacccagactggagtgcagtggcatgatcatagctcactgcagccttgaactcctgggctcaagcagtcccctgcctcagccttctacttgcacaccaccatgcctggcttattatctttaagaaaacagcttatataattcacatatggtatgtatggtatgatacaacttacccatttaaagtgtacaattcactggcttttggtatatgcagagttgtgtatccatcatcataatcggttttaaagcattttcatcaccctacaaagaaaccctgttcctctgagccaccattttcctgccctcagtacctgctaatctgctctctgtctctatagatttgcctattctggacatttcctacaaatggaatcctacagtatgtggttctttgtgactagcttctttcacatgtgtgtcctttttaatgaaaaccaaacaaggtggtatttaccagttgttgagactttaaaggcccctggctgcattttttccagagcccagtttgtctaaaatccacacattcgtcagtagaatttaaaacttggcctatgcctgatgactggtttagactacaggctgcaaagcagcggctggtgggccaaatatggcccataggacatatttggctgggacaacacagagctttaagatttttttttttttaacatagtgctgacatttaaaatttaagaaaagaaagaaaacctgtatttcttgctttggaaatcagaggagcggattacactgggtaggtctgccttcctgggcactgacaggagctcttacacagggtcttgctctccgcatcacttgatatttacaaccgggatctctcctcattcatcttacatacctgttcctctccaggtatttgaaatcatgcaatccctggtctaggtaattcaatgtgagatcatctttgcttacatagacccttgctctacaattaattattaattggatgcaaaagacatatttaaaaagagttgctgggtgtggtggctcactcctgtaatcccaacactttgggaggctgaagtggggggattgcttgagtccaggagttcaagaccagcctgggcagcactggtcaaaccacgtctctactaaaaacacaaaaaactagccaggcatggtggcacatgcctgtagtcctagctactcaggaggctgagatgagaggatcgcttgagcccaggagtgtagtgagctatgattatgtcgctgcattccagcctgggcaacagagtagctccatgaagatagaaatctttgtatgttttgttctctgatagatcccaaacacagaacagtgcctcttacacagtaggccttcaataatatttcttgaagagtgaacagctttcataatacagctttcataatgcattttaaagggtctgaatatccatccttcggccaatttctattaaggaggtgcagttttcaagaaggataaatcatatgtgctcttgcgcccctatttttgctccccatcttctgtaaaatataaaactggtgtcactgagcacccaggtccctgagataaacagttggtttccctgtaggtaatgccctgtgctctgctgtagtggagaagtcttaccaggtgagatgctacagtgaagaaatcttctgttataggcttatgttctggactgactggggaaaggaacctaaaatcgagtctgcctggatgaatggagaggaccgcaacatcctggttttcgaggaccttggttggccaactggcctttctatcgattatttgaacaatgaccgaatctactggagtgacttcaaggaggacgttattgaaaccataaaatatgatgggactgataggagagtcattgcaaaggaaggttagaaattagttagaaagtaatatattaaattaataattaacatatttctaatgtctttgcctgttttctcaagaaggagccctgctcttaggaaatggcttatatagttttttagataccacccctccacccccaccaactcccacctgctgaattaaatgcagatgagttcattagcaataattaaatccttttcgtcctttttacacaactttaaaaaaaaatgcttctcagcagaagatattgaaataactgagtttcctgttaggttgccccagtagaggtggtttcatgtgtaccaatgttaattcatgtctaaccgcttctggacacattcattttcactttactagattgcccagtatgcacaactgtaaatatctaggagatgaacattttttgttgttgttgttcagactctgcagaattgcaatgacccagcacatatcacatttttcctatttggtcagatagatgtcttatgttcaaaagaaaacataaaatcttgccatttaaattgttttccaaaaatgcagtaaaatcagtaacttgaaagtgagctagggccctgtgattggtgtcgggtggtatacatcaatgtggtttaatttctatcttcttgacctcctaatgcagcacactttcacagtcccatgtagctaaagtcagcctgaatattcccagagcttcaaggcattgtatgagggaataattcaagcagaatgacatcagatctagaagtggcggtagggtgtagtgggtattttcttttcaataaccttctgttttgtttttcccctgtgggtaagcagcaatgaacccttacagcctggacatctttgaagaccagttatactggatatctaaggaaaagggagaagtatggaaacaaaataaatttgggcaaggaaagaaagagaaaacgctggtagtgaacccttggctcactcaagttcgaatctttcatcaactcagatacaataagtcaggtaatcaccaactttggtataagatgctcctcattacttggaaatcttatttcaaaataatggctatattgctggaagatggcagtagataacaacaagctaatctcttggtgcatgaaaggggtatatgtgtatgtacgtttgctgggggagaggaacgttttaaccattttcaccaaagaaagataaaattggtggtcaaatgaaattatgcaaaccatcagcaggtaagtaaaaatattagccctcatcattgtttggagtgatggatatgtacttctaggccacagaatccagcagacatcagtcccctgctaaatgtgagttgggttaacaagtcacaaaatgggtttcataggcatcagaaatcttatccttcccattgcaaggctaggctagtcaggtcaacctgagatatgtaggtcttagtttaaaatggccagtcatgtgcattcctacccgctcccctctgtctcactttcccacttctgggccctgcttcctcaggttacctgtgcgctaatttatccttcagcagtgtgtggagcaagatgaaaggcaaagggaagtgaggaaaggaaatagccttttactaagttcttatgtcaaattctctcttcagtgttaattcagccatctattacttcaattaccttataaagacctcccaaaccttataaagacattttattctcatctcaaataaagaaactgaggccgagacagatttagtaacttgtgtgcctaagtcacataacaaatgggtgagttttaatctcagaaatgaaataatttttaggttcaattctatccaacccaaaactcagcatcttgctgtattggcccagtgttcagtatgccaaagtcccaggttgaatgctatggatatgtggcctttgacaagttactcccttcctgtccccatatgtgagtcatgggtggagtctggggttgtcttgagtctgctgatattttgagaccttgatcagccttgaaaaattgcaactcaaagctgagactcccatgagatgacaggggtggcaaatgccttttctagggcatggcttccttgttttggaagtatatcaccaaaacactccagaatactccagaccctaccaatagaatagcttttgtgtcctaagtgcccttgcggctctcacacttggcaattttaaaggtaggagaggaaggcacagtacacctggaaaggctatctcccctccctaccgcctctggaccctgaggagaaggcagaggaaagtctggaggctgcccctgaaggaaaagcatctccctccggcagctgatgctcagggaaggcggctcctttggaaagtgctggtggagtgggggtgggggtgggggtggggatggggagtacagccccagcccagcctgtttgaaccaagagttctgaaagttgagcatgcctcagaattatctggagagcttgttaaatatagattcgtgggccccatctgttgcacttctgatgcaatatgcctgaggtggcctaagaatttgcatttctagttctcctgtgacgttgatgctgctggttcagtgaccacattttgagaaccgctgctccagtcccttgctactcagagtgtgggccatgggccaggagtcttgggatccttatgggagctggctagaaatgcagtctctcaggcccaccccagaccttctgaatcagaatctgcattttagcaagattccccaggtgatggatagcacattcaagtttgaaaatctccactctggagggccgacgaaatggtaatgagacagatattgatggaggcttttggaagatgtgttactaatttatagctatgctttgtctgtggttacatcttgaatgacagacaatcaggatcacagaatgttagtctgagaaggaatgtaaagattatccactccagtacaacccttggataaatcataatacatgctaaggtagaattaataaggctctagacttacctagggagcttttaatggtaatacttgaactctaccccagaccaattcaaatctgaatctctgtgaatgggcatcaataggtttttttgtttgtttgttttttgtttttgagacggaatcttgctctgtcgccctggctggagtgcagtggtgcaatctcggctcactgcaagctccgcctcctgggttcacaccattctcctgcctcagcctcctgagtacctgggactacaggtgcccgccaccacgcccagctaattttttttttgtatttttagtagagacgaggtttcactgtgttagccaggatggtctcgatctcctgacctcgtgatccgcccaaagcggcctcccaaagtgctgggattacaggtgtgagccaccgcgcctggcctggcatcaatagttttgaatagctcccaggtgattatgaggaaccattgctctaaattcccttttcttgcaattaaggtaactgaaacccagaagaaatgtctccttggagggttggggtggaaatcacatccagtatactttggatagaccatatgttatgatctgtccagttttgggtagtgacaaatcttggtataatatgtggatctcactggtcttttgaaccatctcaagttgtttagcactgagtagattttgaggttaggcagtgaaccagatacccaccttccaaacctctcagggcagcagagaagataagtgatgccaatagaaaatgtgagtggtacagaaattggctggagggcccagagagggactatcccactgcagtgtggtggcagagatgatagtgtaaatgagggtgagtggccagctgacacgtggacgagaggtattgagaggatgcctaggctctgctgtcacctggcagagccacttccagttgctgggtattcaggttattcattctgtcaggacctaactgctgttctcacccgctttccagtgcccaacctttgcaaacagatctgcagccacctctgccttctgagacctggaggatacagctgtgcctgtccccaaggctccagctttatagaggggagcaccactgagtgtgatgcaggtaggagcactgcccaagcagctatgggggcctgggagcactcctctgctgccttcaggagtcagaagaatccctgtatgctgggtcctttgcagcagagtggggatggctggaaggagggttaagggatgtgggaggtatgaacagagttgagtgggacttagggggcaaacagaactgtgttccagtgactgctgagaattatttgctaagatctgcagaaatatagatccagtgtccctaaatctattgctgtgttgttttgtaaagacattttgaagagtgagtttttataagacctctacctcaagctggattcccattgccccagaatccactcaaccttaattgtagctcctcagggtagagaaccatgtccagttttgacaactgaaaaagggctaccttttgaaaagtgctttatattatcaggagacgaagaccagcatgaggaagctgtggtttaattctagtcccaaacgctgtgggtgatctattcttggcaagactttttttcaatgactcttttaaggagttaataagccggatgggggcgaataactagtgtccctaactagcatccggtgctggaaaagcctgtgaaaaagtcgtcctgcaattcactagcggcccattttatggctcacatccttggggccttcccccagttttagctgatggggaaaggaaaacgcttaaccaccttctaccaccagggggagcaggcagttagaccaggaaccaccctttgactcattccaaacaggctgaggagttggcaggtttagggaatgaatccagggagaaaaaactgtttcttgtcacccctcttcccctactcttgcactcatcccaacgctactggggaaatattggtaggaatccaatatttcgagccatatttggaacaaaatgacaatttcaggctttgagatttgttccatgctgtggatagattgttttgccacttactgcaatttcacatcgtgggagcagtgtggtcctggttgtcacctcatctactacttttctcatttaaactttttgccaagtggattttattaagattcttgttttaaagaactttaaccgaagtaagcacacgaatgatggcagtcattccatatagggcctcggtttggtataataattaagcaattagtccagtgagatttcttgagtgccagctatgtgccaggcactgttctaagtgctggaggtaacagaggtgaacaaaacagacaaaaccccctgtgtgtattgagtttacattctaagaggacaataaatagagaagtcaataaatacatggtagttcaggtggtactatggagaaaatgaaggcagaggaagagggatgaggatggggtgagtggggattgtcctttagatagtgttcagggaagacctgtctgatacagtgaacattgagtggagactcagattgaaggactgagccaggagggtatctagactctttaaataatatacacatgtaacctatacttattaagcatcttcaatataaaagacactgaagcactaattccccatcaggcacatcctgggagtatgtacaggcctagctgggagcagggacttggagtaagggcagtttgggaggacttgaaaactcaggagctctctagctaactgcctatcaaatatctctatatctgtagctatgtgactgcctgtggactgatcaattactgatgctttggtgtctttagttgaagtttcaaggtgggcctacattaaactcttgattttaactgggttcacggaggagaattctgaaaacttcaaatgagaatgtgaatattttaagagattattttaccactaggttcttgtaactattaatatatgtgctccagagtctagtacctctccattgttttttgggaaaaattctataaactgccccctttctttccactaaatgtatgttactctccaagaccttaaggaaactcactggacttagggggaaggtaagctttgacagggagactaattggctggcctgcccctcctcccacccctaacctgggccggtttgcatggtgtgggcactctgctgagtacagctgactaacacctgcatggctttcccttcctgcagccatcgaactgcctatcaacctgccccccccatgcaggtgcatgcacggaggaaattgctattttgatgagactgacctccccaaatgcaagtaagtctgaatgttgaggtcccagctataggccttgcctcttctggggaaatttgagaccttaaagtagccaggaaaacaaatacaggaacctcaccagttcactaattcttacattttaaccagcttgccttcccttgagggagtctacagagaactgaggcagtgcttctttaactagaatgtgcataagaatcccgtggagatctggttcaagtgcccattctcacgcacagagattctgcatttctaacaagctctaggtaggccacagggtcttggaccacactttggggagcaaggagttagagaattggcagcagcattttcctactcacctggtattgttgattacaacagggctgtgggagaagagctgtctgcagggctgctttagtacaaggcactcgtgatgagcagaaagactgggatggattcggaaagaagatgactgtgttgcgaaaactctaacatggagcaagataaatggatgtctttaaaaagcatttaatgaaagcatataaaagaaagaaacataaccatggtttccatttgtactctctaaggaagcattgcatagattagacaccaataggttttcgtggccagactcaccccctcagtgccacagctactccattacaagtgcatttctaaaatcagagcactgttctttctgcttgtcttctcttggcagaatgaacaaaagtcatgcaggatacattgtctgttcaacatgtaatttatgcagtcaaagctctctctacttcaggatgtgctcagaaaaatgcagtagaagcctaagaacataacagctagtgaatgatttgctttttcctttcaggtgtcctagcggctacaccggaaaatattgtgaaatggcgttttcaaaaggcatctctccaggaacaagtaagttttaagaatgtgagcaacttggaaattactcatggcccctacattgaatgctgtcacagcttttctacttaacccagtctttgaaggagtggttctagcccccagtttctgccaggattgcgggctcccatgtgttgatgtgctctctgctatcttcttctatagccgcagtagctgtgctgttgacaatcctcttgatcgtcgtaattggagctctggcaattgcaggattcttccactatagaaggaccggctcccttttgcctgctctgcccaagctgccaaggtcagtttcattatggggaacgttgatgtttgaagcctaagaaattcatatgaagccatgtgaaggacttagttttctttctaagttaaaaaagcacaatacgcagttcaccgattccacagaaacaaaaagtagtgaggatgtaaagcagtcacttcaaatcccaacttcttagtcaagtgcttctctaaagcctgagtgacaagctgtgttttgtagtccaaatggttgtgcctactggtaggtgttcaggtcagagaggagtgaaaaggcagctgtgtgatggcccaggctttatccttctatgtgctggactctttttcttttagatctcatggttcaggaatgtgctttaacgtttccaggtagctaagggaacttactaccatatttgacagtgtaaatttagagtgggaattgagcattacatttgaggaagatttggcaatgtggaggagagggtactattgtgaaaggttgtatttgttgtttttgttgttgttgttttaaataacaagacactgttttggttacttctttccagcttaagcagtctcgtcaagccctctgaaaatgggaatggggtgaccttcagatcaggggcagatcttaacatggatattggagtgtctggttttggacctgagactgctattgacaggtcaatggcaatggtgagtatggtttcaaaatgattatttgaaggttgtcatttatagaataaatactttttataaagaacaaaattcacctagagaagactgaaatacagtattaggcctctcagaataaggtctgcactacacaagttaggaaacattaggtttgttgctgaaaggtgtctaaaaacattggtaataacattggaatttacccctgctctaagccacgctgttgaattggaatcatgaacagtctgaagtttaacttgaatattgaagagctttctggtttttttgagggtggtgtgtgaggaggacatgatattttgtttttatttgatgacttttatatgtataaaaggagtagggaactatatttttcctagtgtcatatatttttctgccaatgtatagtgatgaaataaacagtgattttagagttggcgttggtccagaccacggctctgccacctactaagtatgtgacaatagacatggagcttgatatctctgaccctcattgtccctatttgtaaaacaggtaaaataatacctcctgggaggaccaaatgaaatactttatgagggggctgccacagtcttggcactgagggggctttctgtaatcagtattgggaaaccactttcagaattttgtctctccctcaaatctttcattgttttccttccctgagaatattatattatccattctttttccttcccctctctccttattcttcttttcttcttccaccattatccttttctctgtggcccagacccaattcccaagtgagttatttaagagaatttggatataagaagaatgttaccatttccttgagttggtaaattagtgcatgttatgttactttgcataataatttgccatatggaggtcttgtgttttgctggcctttttttttttttttttttgcaagttctcttttgggtaacttatgacgtagcacctagcgtacctccaggtgtgaggaaggcacctttctttgtgtgtgaaccagattagtatggtgtaatctctctctctgtttctctctctctctctctctctctttctgtctctgccatcagagtgaagactttgtcatggaaatggggaagcagcccataatatttgaaaacccaatgtactcagccagagacagtgctgtcaaagtggttcagccaatccaggtgagaaaccatacagtcttttctttcagttactgctgtcgctggatcttaatctattgagtcatgtcttaggattttcctaaccttccctccaaagggaaggaagcatagtgagtggtccatgctgcagctgccctatctgcaggaacaggaccaacccaaggacataagacctgaaaacaatcagaatcctgttctgttgcacagtggtggaggtttggcagccatgccggggctgctggccaagaacctttcattttgagtggtgtcagagcaagagaggtctgagtcccttcaggggcctgggaaacacagtgcctgaagcaccacagcttctctacaaatacttgtgaaatgaatgagtggagaattgtcaggtcactatacaggaatttggggacggggcccactctctggttcttgctgctatcccaagcatgtggtttgaggtggattaaagggagagggacctcttatgcttgctgttgccatacttttctgaaaagtacaaaggtctctagagttgatgggcagatatctaaatttccttgttgcagccttgttgctcagtcatctttttttgtgtgtgtgagcaacaaggctatttatttcacctgggtgcaggcgggctgagtccgaaaagagagtcagcgaagggagataggggtggggccgttttataagatttgggtaggtaaaggaaaattacagtcaaaggggggttgttctctggtgggcaagagtgggggtcacaaggtgctcagtgggggggagtttttgagccagatgagccaggaaaaggaatttcacaaggtaatgtcatcagttaaggcaaggaccggccattttcacttcttttgtggtggaatgtcatcagttaaggcaggaacaggccattttcacttcttttgtgattcttcagttacttcaggccatctgggtgtatacatgcaggtcacaggggatgcgatggcttggcttgggctcagaggcctgacattcctgccttcttatattaataagaaaaataacataaaatagtattgaagtgttggggcaaagaaaaaaatttttgggggggtggcatggagagataatgcgcagtgtttctcagggctgctcaagtgggattaggggcggtgtgggaacctagagtgggagagattaagctgaaggaagattttgtggtaaggggtgatattgtggggttgttagaagaaacatttgtcgtgtagaattattggtgatggcctggatacggttttgtatgaattgaaaaagtaaatggaataagagaaggagaaaaacaggtattaaaggactaagaattgggaggacccaggacatctaattagagagtgcccaaggaggttcggcatagccctgccagcaaagattatttatttactttaagagggagttaagagtggcggtttggggatagcaccacgagatatcagctgtgacggcttggagaaacagtgtaaaccggtggtataaacaagagcagggcatttatgagtagttgagaacggtgaataggagtatgactagacagaagatagtagggatgacaagttttttggggtgcagtccaagttggtctggtgtctggaatgagactggggcttaataaaaaggagcgtctatacaggagcttaaatggctgtaccctgtagcattctgaggacaggcctgaattctgagaagggcaagtggtaaaagtattgtccagtcctttttaagttggtggctgagcttggtgaggtgtgtttttaaaagaccattagtccattctacctttcttgaagattgaggaccgtaaggggtatgaaggttccactgaataccaagagcctgagaaactgcttgggtgacttgacaagtaaaggccggtccactgtcggactgtatagaggtgggaaggccaaaccgaggaattatgtctgacagaagggaagaaatgaccgcagtggacttctcagaccctgtgggaaaggcctcttcctatcctgtgaaagtgtctacccagaccaagaggtattttagtttcctgacttggggcatgtgagtaaagtcaatttgccagtcctgggcgggggaaaaaccccgagcttgaggtgtagggaagggagggggcctgagaaattcctgaggagtagtagaatagcagatggaacactgagaagtgatttccttgaggatagatttccacaatggaaaggaaatgagaggttctaagagactggctagtggcttgtaacctacatggaagaggttatgaaatgatgacagaatagaatgggcctgtgaggctggaaggagatattttccttggtctaagaaccatttgccttgtgtgggaagagattgataggtggaagtttcagcgggggactaggtgggagtgactaatgtgaaggagaaaaactgactgtgagggacagaagttggaacgctagctgcttttttagctaatttatcagcataagcattgtcctgagcgatgggatctgatgcctttttgatggcccttgcagtgaatgactccagcttcctctggaagtaaagcggctttgagaagcgtttttattaaagacgcattaatgatagaggacccttgtgtagtgaggaaacctcttgcatggtggtgcaggatatggaaggcatatatagagtcagtataaatactgacatgtagtccctttgcaagagtgagggtttgacttaaggcaatgagttcggcttgctgagaggtagtggagcggggcagagcggtagcctcaatgatagatgtggaagatactatagcatagcctgcctttgctggtgagtggcgattaggcctggtggaactgctatcagtaaaccaagtgtgttcagggtgaggaacaggaaaaaaggaaatatggggaaatggggtgaatgtcaggtggatcagagagatacagtcatgggggtcaggtgtggtatccgtagtaatgtgggaggctggattgaagtctgggccagaaacaatggtaattgtgggagactcaacaaagagtgagtacagctgaaggagctggggaacagacagtatatgcgtcaggtgggagaaagaaaatagattttggaagttatgagaactgtagagagtgagttgagcatagtttgtgatttttagggcctctaaaagtattaaagcagtggcagccgctgcacgcagacatgagggctaggctaaaacagtaaggtcaagttgtttggacagaaaggctacagggcacggtcccggctcttgtgtaagaattctgactgcactaaccatgcctaggaaggaaaggagttgttgttttgtagaagggattgaggtttgggagattagtcagacttgatcagcagggagagcatgtgtgtttttatgagaattatgccgaaataggtaacagatgaggatgaaatttgggcttgactgaagtaatgggggctgtctgtgaagctttgcagcagtacagcccaggtaatttgctgagcctgatgggtgtcaggttcagtctaagtgaaagtgaagagaggctgggatgacgggtgcaaaggaatagtaaagaaagcatgtttgagattcagtccgtcatctttaagaagagctgggagatgaaataggaatataggtgaagggaataactttacataaggtctgcatcaatagccccagcgccacttttactgcttgtcaactgcgaacatgtatctcctttgtcacaacaactatggccttagtgacaatgaataactgtcattgttaacacctaatgctccttttgaactcgagatatggcacattttaatacagaaactagaaatgtttattttacaaatattttgtgattttaagatcggaaatgtttaaatcttgaaagcattttccctgatcctctgataaacagatatgaaaactttaatcacatgataaaagagatacgacatttcatttgacatcttcacttaaaataaaatgaggccatgtatacaaatgcatatccaagtttcagaataaacaagtaatgaatgtgaaaatataggaaaaggagtgaattgtctaccttgtagtttattatgcattcatggtaatttggtcttaaaagggaaccttggaattgtatgaatgttatagaaaaatgcgtagaagattattaattctatcattctcatcttttcaaaaattcaacctctttttagtagtactatgaaatcttaatttccgaagataggatttattaatattcaaagaaattattaagatccaaagataggattctcagttcatcagtgaggttggggaattattcttgctgttcttctaggatttggcttccagtatataactagagtatgattatccaaaaatttggtcaacagtgggagtaagaaggtatagagaatacagtagaaattgctagtaataagtgagagtgtgaccagtgagggatgtatttgcctcccaggattaaggtatgaggtgacttagtggttgctgctcttgattttggggcggtgggagtgatgtttagtcctggcctactgggtcatgcaataaaaatggtgcctgatgatgtctgtgggagaacaagatggcaaaaagagccagagttggtacaaactttacagcaaatttatttactactaaattctttcaaaattgggtaaaggcctttaacatgtccacaggtgactgtatctgaaaatgtggataataagaattatggaagtcccataaacccttctgagatagttccagagacaaacccaacttcaccagctgctgatggaactcaggtaacagttgccgactcctgaaataatgtgggatttggaaaaactttgggatgactgggtttttattaaccttaagcaaacaagggagattctggaaggctcaaagatctcaagatgtgttgacagttaataaatataattttttaaaaagtcatagattgaaaaactttccaccaaataaagctacattctaacatcgagttgggaataatgttccttgtaacataggaggacatgtcacaaagaagaacaaatagacttctggatccagtatcttcagaccagagacatttaagttgagaaattgactcagtatgaataaagatttcacggtgtcaaagatacagatgaaagatccgtctgtgtgtgccgtgatttctctacagcatgcatctttattctttcaagctgttcttcgctctcctgctattacagatctttaccactagatggcactaatttttccattcatcatccatctattcattattggccaaccaatcatctaactaacgttattcccctcgatgtgtcagggatggtgtttaatactggagattgaaagaaaaaaatgccactagatggagcttcttaaacatgcctgcaggtcctttgcaattggtacactatttggtctgcaggaagaaattcaataaatatatttgatattaaactctgtattaatgtatatcattagttttaatgaatgcatttgcagctataccagatatagctgtttgaatctggacaaactgttttacttctggggctagagtcctcaataatatttctcactgggggcgctattggcatattgagtgggacagttctttgtgctacaaaactgtcctatgcactcagggaatttcagtatttctggtccctgtccactaaattccagtagtgtctcccctaattcagtgtgaccccagaaatcacctcccctccccaacacatgtgcactcactcctggttgagaaccgctaggatctggaatgtctctgttctaagattctatgaccaattttgtgaagtaatgtaaagaaatgaaagtctaagagtagttggaaattttaccattttatacaatctttatttctcaaatttcatagtctataaacattgatatcttggtaacttggcagtctcattatcaccttaaacattggtttctgttctgctgatttaaatcaaaataaaatttgacctaaattgatgctgagaagagtctatatcaaggcttctgtacaccttctcaaattcccttatttcttcttctcatgtcacacacacacacacacacacacacacacacacactcatacactcacagacatacataaatattgtctagaaaggaattttcagtttcagatttttcaagggactaaacattttttctttaagctatattaaaaatggattttgaagattaattttccacagacacacggatgcttgaatgtcatatatttggtcctccaagcctgagtcaaccccaagctagtgccagatttattttatattttcaacattttttctcagtccatctctagtctagtgatcttcttcactaaatagacattttccccagctggtgcaggaaggggactgtggtggggaggctgtaacctctgatctgcatgtctgttatcagaaacaaaatgtaaactgacagtctctttcaaaggagagcagatcttcaccaattgtagtcctttctttctcttcccttttgtaataccttggttcctcctcttacttttttacattagtgaggctgagaccctctaaaatgtgtcttccatgttatgtccagggatctcactgtatttcttccctcctgggcactgagttaacagccagcatgctttaaaagcagtagaggcgcttgggtgagatcacctaggttgatttgaatatgccagagtcccacaaatgtatctttcatccataaatatgttgaaagactaacaattaaaaacatgggctgggcacggtggctcacacctgtaatcccagctctttgggaggccgaggtgggtggatcatgacatcaggagttcaagaccaacctggccaacatagtgaaaccccatctctactaaaaatgcaaaaattagctgagtgtggtggcatatgcctgtagtcccagctattcaggaggctgaggtgggaggattgcttgaacccgggaggcagaggttgtagtgggccgagactgtgacactgcactccagcctaggcgacagagtgagacttcatctcaaaaaaaaaaaaaaaaagattcagttctatcattttccaaaagttacattgatatgcataggatcccccaaggagacaaaaatgaaagtcaccgtccctttcctcttgttagtaattgcttaacttcaagttagccatttcattttgaagcaatgacatctaagagactttggcccgccccacttaactgtaagcgcccagaggcagggctctgacctgaatgtcttcatgttccccttgggggcactatgtacaaagcaggttctcacttgaatgtgggttaaagtgaagacctcttctacttctgtagccctgtgttccccactcctccacaggctggtcccctgctgtcacagagtaagagacaccccataaaacctgtgggctccctcagctcctgttgagagtaggctgtctgttcccttgtctcccaccaggtttttatctggcagtcagcatgacaggcaacttttcagtaaagcgtgggccacgcaccatggtccagggtgattatctttgggttctccagtttatgggcctctgggtcccctgagtaatcattacctgcccttctacctgcaagttagttgtataatcttgctgtgactcagcaagtataggataataagtgtacctacctctggggtttgttaaaaaaaatcagaaacttgtaaaactcttagaatagttcctgacacatagtaagcactcaataaatgttagatgtttttgttattattattgtgacacaggagggaatgatgaagggagaagggatactcttgagttgaccaaagaatgttactttagggaataagagttacagtttggctttgccatctccacccaattttcaggcagccccagaaatctctttttctccagatgcatcttgtgcatgtctgttttatgtgttctctctgtactgaggtaaccaggtgatttgcttgtagatactatggcacaaattctataatatataaatttgaagtcaaagaagtgtttaaaaccattcgattaaaagagcccagagtttcagttactgttcagggaccataggaggaattgaacaatttaccatatgggctgaatcacatggtcccaggtcccaaattgctttacccttcagtaagaagaaattttaaaactgagacaggaggaaaagaaacccacaaaataattccattactgagaggtttttgttttccccttttcatttaggtgacaaaatggaatctcttcaaacgaaaatctaaacaaactaccaactttgaaaatccaatctatgcacaggtaatttttaacaatttttcttagcacagacattttttcttagaaattatttgcttggttaaattggacacacacttagattattctgagcagagtggccacaaatagtcttctttatgaaaaaccgtgtatggtgaccttgggggaataaatggctgattcctgttacattgtattcttagatggagaacgagcaaaaggaaagtgttgctgcgacaccacctccatcaccttcgctccctgctaagcctaagcctccttcgagaagagacccaactccaacctattctgcaacagaagacacttttaaagacaccgcaaatcttgttaaagaagactctgaagtatagctataccagctatttagggaataattagaaacacacttttgcacatatattttttacaaacagatgaaaaaagttaacattcagtactttatgaaaaaaatatatttttccctgtttgcctatagttggaggtatcctgtgtgtctttttttacttatgccgtctcatatttttacaaataattatcacaatgtactatatgtatatctttgcactgaagttgtctgaaggtaatactataaatatattgtatatttgtaaattttggaaagattatcctgttactgaatttgctaataaagatgtctgctgatttggttggtgatcattatagtaaatgatccaacaagaaaaggaattgactggggacctttagccgtgtctaaagaagaggcaccactcatatttcctataaaattatctaggaaaggaatccaggccccgctcttgggtccatttttacacattagcacttaattaatgttcaatattacatgtcaatttgattaatggctatgttgataggggccactatgtgttgtatagacatctggacttgactgtagactcctcagataatacagaaggtaggaaaagcaattcagtttggcccttctgtgtgttggcattgtctaaccagaactctctgtttcatgtgtgttctctcactagctgccaagacaacatttttatttgtgatgtctatgaggaaatcccatatcattaagtgccagtgtcctgcattgagtttgtggttaattaaatgagctcttctgctgatggaccctggagcaatttctcccctcacctgacattcaaggtggtcacctgccctagtagttggagctcagtagctgaatttctgaaaccaaatctgtgtcttcataaaataaggtgcaaaaaaaaaaaataccagttaagtaaagcctcaactgggtttttgtttctatgaaaatatcattataatcactatttatttcctaagttgaacctgaatagaaagggaaaccattcttattaagctttttattaggccctgtggctaaatgtgtacatttatattagaatgtactgtacagtccagatcttttctttaattcttattggttttttttttttttttttttttagagatggagtcttgctatattgccaaggctgatcttgaagtcctgggctcaagtgatcctcccacctcagcctcctgagtggttggggttacgggcgtgagccactgtgcctggcttccagctctcctcttaaatagtgggtatagtctgcacaacaggaaccatggcaggaatatacactttcccatagcaaatagcatacctgactctctgtgctaatattgcacatttgttaaacaatgaatgaatggatggatggatggatggatgaatgaatgaaacatatactactgattattttattccagagttctcaaaatatttgttgctgatattttgagtgctgactgtaattactttgattagataaacaactggaaataatgctgctgaaaaagttctaataaatgtgtattttatcaga

SEQ ID NO: 121 - RNA, 15657 nt, Homo sapiens
  source 1..15657: mol_type = other RNA
aggcttttggccactaggagctggcggaggtgcagacctaaaggagcgttcgctagcagaggcgctgccggtgcggtgtgctacgcgcgcccacctcccggggaaggaacggcgaggccggggaccgtcgcggagatggatcgcgggccggcagcagtggcgtgcacgctgctcctggctctcgtcgcctgcctagcgccggccagtggccaagaatgtgacagtgcgcattttcgctgtggaagtgggcattgcatccctgcagactggaggtgtgatgggaccaaagactgttcagatgacgcggatgaaattggctgcgctgttgtgacctgccagcagggctatttcaagtgccagagtgagggacaatgcatccccaactcctgggtgtgtgaccaagatcaagactgtgatgatggctcagatgaacgtcaagattgctcacaaagtacatgctcaagtcatcagataacatgctccaatggtcagtgtatcccaagtgaatacaggtgcgaccacgtcagagactgccccgatggagctgatgagaatgactgccagtacccaacatgtgagcagcttacttgtgacaatggggcctgctataacaccagtcagaagtgtgattggaaagttgattgcagggactcctcagatgaaatcaactgcactgagatatgcttgcacaatgagttttcatgtggcaatggagagtgtatccctcgtgcttatgtctgtgaccatgacaatgattgccaagacggcagtgacgaacatgcttgcaactatccgacctgcggtggttaccagttcacttgccccagtggccgatgcatttatcaaaactgggtttgtgatggagaagatgactgtaaagataatggagatgaagatggatgtgaaagcggtcctcatgatgttcataaatgttccccaagagaatggtcttgcccagagtcgggacgatgcatctccatttataaagtttgtgatgggattttagattgcccaggaagagaagatgaaaacaacactagtaccggaaaatactgtagtatgactctgtgctctgccttgaactgccagtaccagtgccatgagacgccgtatggaggagcgtgtttttgtcccccaggttatatcatcaaccacaatgacagccgtacctgtgttgagtttgatgattgccagatatggggaatttgtgaccagaagtgtgaaagccgacctggccgtcacctgtgccactgtgaagaagggtatatcttggagcgtggacagtattgcaaagctaatgattcctttggcgaggcctccattatcttctccaatggtcgggatttgttaattggtgatattcatggaaggagcttccggatcctagtggagtctcagaatcgtggagtggccgtgggtgtggctttccactatcacctgcaaagagttttttggacagacaccgtgcaaaataaggttttttcagttgacattaatggtttaaatatccaagaggttctcaatgtttctgttgaaaccccagagaacctggctgtggactgggttaataataaaatctatctagtggaaaccaaggtcaaccgcatagatatggtaaatttggatggaagctatcgggttacccttataactgaaaacttggggcatcctagaggaattgccgtggacccaactgttggttatttatttttctcagattgggagagcctttctggggaacctaagctggaaagggcattcatggatggcagcaaccgtaaagacttggtgaaaacaaagctgggatggcctgctggggtaactctggatatgatatcgaagcgtgtttactgggttgactctcggtttgattacattgaaactgtaacttatgatggaattcaaaggaagactgtagttcatggaggctccctcattcctcatccctttggagtaagcttatttgaaggtcaggtgttctttacagattggacaaagatggccgtgctgaaggcaaacaagttcacagagaccaacccacaagtgtactaccaggcttccctgaggccctatggagtgactgtttaccattccctcagacagccctatgctaccaatccgtgtaaagataacaatgggggctgtgagcaggtctgtgtcctcagccacagaacagataatgatggtttgggtttccgttgcaagtgcacattcggcttccaactggatacagatgagcgccactgcattgctgttcagaatttcctcattttttcatcccaagttgctattcgtgggatcccgttcaccttgtctacccaggaagatgtcatggttccagtttcggggaatccttctttctttgtcgggattgattttgacgcccaggacagcactatctttttttcagatatgtcaaaacacatgatttttaagcaaaagattgatggcacaggaagagaaattctcgcagctaacagggtggaaaatgttgaaagtttggcttttgattggatttcaaagaatctctattggacagactctcattacaagagtatcagtgtcatgaggctagctgataaaacgagacgcacagtagttcagtatttaaataacccacggtcggtggtagttcatccttttgccgggtatctattcttcactgattggttccgtcctgctaaaattatgagagcatggagtgacggatctcacctcttgcctgtaataaacactactcttggatggcccaatggcttggccatcgattgggctgcttcacgattgtactgggtagatgcctattttgataaaattgagcacagcacctttgatggtttagacagaagaagactgggccatatagagcagatgacacatccgtttggacttgccatctttggagagcatttattttttactgactggagactgggtgccattattcgagtcaggaaagcagatggtggagaaatgacagttatccgaagtggcattgcttacatactgcatttgaaatcgtatgatgtcaacatccagactggttctaacgcctgtaatcaacccacgcatcctaacggtgactgcagccacttctgcttcccggtgccaaatttccagcgagtgtgtgggtgcccttatggaatgaggctggcttccaatcacttgacatgcgagggggacccaaccaatgaaccacccacagagcagtgtggcttattttccttcccctgtaaaaatggcagatgtgtgcccaattactatctctgtgatggagtcgatgattgtcatgataacagtgatgagcaactatgtggcacacttaataatacctgttcatcttcggcgttcacctgtggccatggggagtgcattcctgcacactggcgctgtgacaaacgcaacgactgtgtggatggcagtgatgagcacaactgccccacccacgcacctgcttcctgccttgacacccaatacacctgtgataatcaccagtgtatctcaaagaactgggtctgtgacacagacaatgattgtggggatggatctgatgaaaagaactgcaattcgacagagacatgccaacctagtcagtttaattgccccaatcatcgatgtattgacctatcgtttgtctgtgatggtgacaaggattgtgttgatggatctgatgaggttggttgtgtattaaactgtactgcttctcaattcaagtgtgccagtggggataaatgtattggcgtcacaaatcgttgtgatggtgtttttgattgcagtgacaactcggatgaagcaggctgtccaaccaggcctcctggtatgtgccactcagatgaatttcagtgccaagaagatggtatctgcatcccgaacttctgggaatgtgatgggcatccagactgcctctatggatctgatgagcacaatgcctgtgtccccaagacttgcccttcatcatatttccactgtgacaacggaaactgcatccacagggcatggctctgtgatcgggacaatgactgcggggatatgagtgatgagaaggactgccctactcagccctttcgctgtcctagttggcaatggcagtgtcttggccataacatctgtgtgaatctgagtgtagtgtgtgatggcatctttgactgccccaatgggacagatgagtccccactttgcaatgggaacagctgctcagatttcaatggtggttgtactcacgagtgtgttcaagagccctttggggctaaatgcctatgtccattgggattcttacttgccaatgattctaagacctgtgaagacatagatgaatgtgatattctaggctcttgtagccagcactgttacaatatgagaggttctttccggtgctcgtgtgatacaggctacatgttagaaagtgatgggaggacttgcaaagttacagcatctgagagtctgctgttacttgtggcaagtcagaacaaaattattgccgacagtgtcacctcccaggtccacaatatctattcattggtcgagaatggttcttacattgtagctgttgattttgattcaattagtggtcgtatcttttggtctgatgcaactcagggtaaaacctggagtgcgtttcaaaatggaacggacagaagagtggtatttgacagtagcatcatcttgactgaaactattgcaatagattgggtaggtcgtaatctttactggacagactatgctctggaaacaattgaagtctccaaaattgatgggagccacaggactgtgctgattagtaaaaacctaacaaatccaagaggactagcattagatcccagaatgaatgagcatctactgttctggtctgactggggccaccaccctcgcatcgagcgagccagcatggacggcagcatgcgcactgtcattgtccaggacaagatcttctggccctgcggcttaactattgactaccccaacagactgctctacttcatggactcctatcttgattacatggacttttgtgattataatggacaccatcggagacaggtgatagccagtgatttgattatacggcacccctatgccctaactctctttgaagactctgtgtactggactgaccgtgctactcgtcgggttatgcgagccaacaagtggcatggagggaaccagtcagttgtaatgtataatattcaatggccccttgggattgttgcggttcatccttcgaaacaaccaaattccgtgaatccatgtgccttttcccgctgcagccatctctgcctgctttcctcacaggggcctcatttttactcctgtgtttgtccttcaggatggagtctgtctcctgatctcctgaattgcttgagagatgatcaacctttcttaataactgtaaggcaacatataatttttggaatctcccttaatcctgaggtgaagagcaatgatgctatggtccccatagcagggatacagaatggtttagatgttgaatttgatgatgctgagcaatacatctattgggttgaaaatccaggtgaaattcacagagtgaagacagatggcaccaacaggacagtatttgcttctatatctatggtggggccttctatgaacctggccttagattggatttcaagaaacctttattctaccaatcctagaactcagtcaatcgaggttttgacactccacggagatatcagatacagaaaaacattgattgccaatgatgggacagctcttggagttggctttccaattggcataactgttgatcctgctcgtgggaagctgtactggtcagaccaaggaactgacagtggggttcctgccaagatcgccagtgctaacatggatggcacatctgtgaaaactctctttactgggaacctcgaacacctggagtgtgtcactcttgacatcgaagagcagaaactctactgggcagtcactggaagaggagtgattgaaagaggaaacgtggatggaacagatcgaatgatcctggtacaccagctttcccacccctggggaattgcagtccatgattctttcctttattatactgatgaacagtatgaggtcattgaaagagttgataaggccactggggccaacaaaatagtcttgagagataatgttccaaatctgaggggtcttcaagtttatcacagacgcaatgccgccgaatcctcaaatggctgtagcaacaacatgaatgcctgtcagcagatttgcctgcctgtaccaggaggattgttttcctgcgcctgtgccactggatttaaactcaatcctgataatcggtcctgctctccatataactctttcattgttgtttcaatgctgtctgcaatcagaggctttagcttggaattgtcagatcattcagaaaccatggtgccggtggcaggccaaggacgaaacgcactgcatgtggatgtggatgtgtcctctggctttatttattggtgtgattttagcagctcagtggcatctgataatgcgatccgtagaattaaaccagatggatcttctctgatgaacattgtgacacatggaataggagaaaatggagtccggggtattgcagtggattgggtagcaggaaatctttatttcaccaatgcctttgtttctgaaacactgatagaagttctgcggatcaatactacttaccgccgtgttcttcttaaagtcacagtggacatgcctaggcatattgttgtagatcccaagaacagatacctcttctgggctgactatgggcagagaccaaagattgagcgttctttccttgactgtaccaatcgaacagtgcttgtgtcagagggcattgtcacaccacggggcttggcagtggaccgaagtgatggctacgtttattgggttgatgattctttagatataattgcaaggattcgtatcaatggagagaactctgaagtgattcgttatggcagtcgttacccaactccttatggcatcactgtttttgaaaattctatcatatgggtagataggaatttgaaaaagatcttccaagccagcaaggaaccagagaacacagagccacccacagtgataagagacaatatcaactggctaagagatgtgaccatctttgacaagcaagtccagccccggtcaccagcagaggtcaacaacaacccttgcttggaaaacaatggtgggtgctctcatctctgctttgctctgcctggattgcacaccccaaaatgtgactgtgcctttgggaccctgcaaagtgatggcaagaattgtgccatttcaacagaaaatttcctcatctttgccttgtctaattccttgagaagcttacacttggaccctgaaaaccatagcccacctttccaaacaataaatgtggaaagaactgtcatgtctctagactatgacagtgtaagtgatagaatctacttcacacaaaatttagcctctggagttggacagatttcctatgccaccctgtcttcagggatccatactccaactgtcattgcttcaggtatagggactgctgatggcattgcctttgactggattactagaagaatttattacagtgactacctcaaccagatgattaattccatggctgaagatgggtctaaccgcactgtgatagcccgcgttccaaaaccaagagcaattgtgttagatccctgccaagggtacctgtactgggctgactgggatacacatgccaaaatcgagagagccacattgggaggaaacttccgcgtacccattgtgaacagcagtctggtcatgcccagtgggctgactctggactatgaagaggaccttctctactgggtggatgctagtctgcagaggattgaacgcagcactctgacgggcgtggatcgtgaagtcattgtcaatgcagccgttcatgcttttggcttgactctctatggccagtatatttactggactgacttgtacacacaaagaatttaccgagctaacaaatatgacgggtcaggtcagattgcaatgaccacaaatttgctctcccagcccaggggaatcaacactgttgtgaagaaccagaaacaacagtgtaacaatccttgtgaacagtttaatgggggctgcagccatatctgtgcaccaggtccaaatggtgccgagtgccagtgtccacatgagggcaactggtatttggccaacaacaggaagcactgcattgtggacaatggtgaacgatgtggtgcatcttccttcacctgctccaatgggcgctgcatctcggaagagtggaagtgtgataatgacaacgactgtggggatggcagtgatgagatggaaagtgtctgtgcacttcacacctgctcaccgacagccttcacctgtgccaatgggcgatgtgtccaatactcttaccgctgtgattactacaatgactgtggtgatggcagtgatgaggcagggtgcctgttcagggactgcaatgccaccacggagtttatgtgcaataacagaaggtgcatacctcgtgagtttatctgcaatggtgtagacaactgccatgataataacacttcagatgagaaaaattgccctgatcgcacttgccagtctggatacacaaaatgtcataattcaaatatttgtattcctcgcgtttatttgtgtgacggagacaatgactgtggagataacagtgatgaaaaccctacttattgcaccactcacacgtgcagcagcagtgagttccaatgcgcatctgggcgctgtattcctcaacattggtattgtgatcaagaaacagattgttttgatgcctctgatgaacctgcctcttgtggtcactctgagcgaacatgcctagctgatgagttcaagtgtgatggtgggaggtgcatcccaagcgaatggatctgtgacggtgataatgactgtggggatatgagtgacgaggataaaaggcaccagtgtcagaatcaaaactgctcggattccgagtttctctgtgtaaatgacagacctccggacaggaggtgcattccccagtcttgggtctgtgatggcgatgtggattgtactgacggctacgatgagaatcagaattgcaccaggagaacttgctctgaaaatgaattcacctgtggttacggactgtgtatcccaaagatattcaggtgtgaccggcacaatgactgtggtgactatagcgacgagaggggctgcttataccagacttgccaacagaatcagtttacctgtcagaacgggcgctgcattagtaaaaccttcgtctgtgatgaggataatgactgtggagacggatctgatgagctgatgcacctgtgccacaccccagaacccacgtgtccacctcacgagttcaagtgtgacaatgggcgctgcatcgagatgatgaaactctgcaaccacctagatgactgtttggacaacagcgatgagaaaggctgtggcattaatgaatgccatgacccttcaatcagtggctgcgatcacaactgcacagacaccttaaccagtttctattgttcctgtcgtcctggttacaagctcatgtctgacaagcggacttgtgttgatattgatgaatgcacagagatgccttttgtctgtagccagaagtgtgagaatgtaataggctcctacatctgtaagtgtgccccaggctacctccgagaaccagatggaaagacctgccggcaaaacagtaacatcgaaccctatctcatttttagcaaccgttactatttgagaaatttaactatagatggctatttttactccctcatcttggaaggactggacaatgttgtggcattagattttgaccgagtagagaagagattgtattggattgatacacagaggcaagtcattgagagaatgtttctgaataagacaaacaaggagacaatcataaaccacagactaccagctgcagaaagtctggctgtagactgggtttccagaaagctctactggttggatgcccgcctggatggcctctttgtctctgacctcaatggtggacaccgccgcatgctggcccagcactgtgtggatgccaacaacaccttctgctttgataatcccagaggacttgcccttcaccctcaatatgggtacctctactgggcagactggggtcaccgcgcatacattgggagagtaggcatggatggaaccaacaagtctgtgataatctccaccaagttagagtggcctaatggcatcaccattgattacaccaatgatctactctactgggcagatgcccacctgggttacatagagtactctgatttggagggccaccatcgacacacggtgtatgatggggcactgcctcaccctttcgctattaccatttttgaagacactatttattggacagattggaatacaaggacagtggaaaagggaaacaaatatgatggatcaaatagacagacactggtgaacacaacacacagaccatttgacatccatgtgtaccatccatataggcagcccattgtgagcaatccctgtggtaccaacaatggtggctgttctcatctctgcctcatcaagccaggaggaaaagggttcacttgcgagtgtccagatgacttccgcacccttcagctgagtggcagcacctactgcatgcccatgtgctccagcacccagttcctgtgcgctaacaatgaaaagtgcattcctatctggtggaaatgtgatggacagaaagactgctcagatggctctgatgaactggccctttgcccgcagcgcttctgccgactgggacagttccagtgcagtgacggcaactgcaccagcccgcagactttatgcaatgctcaccaaaattgccctgatgggtctgatgaagaccgtcttctttgtgagaatcaccactgtgactccaatgaatggcagtgcgccaacaaacgttgcatcccagaatcctggcagtgtgacacatttaacgactgtgaggataactcagatgaagacagttcccactgtgccagcaggacctgccggccgggccagtttcggtgtgctaatggccgctgcatcccgcaggcctggaagtgtgatgtggataatgattgtggagaccactcggatgagcccattgaagaatgcatgagctctgcccatctctgtgacaacttcacagaattcagctgcaaaacaaattaccgctgcatcccaaagtgggccgtgtgcaatggtgtagatgactgcagggacaacagtgatgagcaaggctgtgaggagaggacatgccatcctgtgggggatttccgctgtaaaaatcaccactgcatccctcttcgttggcagtgtgatgggcaaaatgactgtggagataactcagatgaggaaaactgtgctccccgggagtgcacagagagcgagtttcgatgtgtcaatcagcagtgcattccctcgcgatggatctgtgaccattacaacgactgtggggacaactcagatgaacgggactgtgagatgaggacctgccatcctgaatattttcagtgtacaagtggacattgtgtacacagtgaactgaaatgcgatggatccgctgactgtttggatgcgtctgatgaagctgattgtcccacacgctttcctgatggtgcatactgccaggctactatgttcgaatgcaaaaaccatgtttgtatcccgccatattggaaatgtgatggcgatgatgactgtggcgatggttcagatgaagaacttcacctgtgcttggatgttccctgtaattcaccaaaccgtttccggtgtgacaacaatcgctgcatttatagtcatgaggtgtgcaatggtgtggatgactgtggagatggaactgatgagacagaggagcactgtagaaaaccgacccctaaaccttgtacagaatatgaatataagtgtggcaatgggcattgcattccacatgacaatgtgtgtgatgatgccgatgactgtggtgactggtccgatgaactgggttgcaataaaggaaaagaaagaacatgtgctgaaaatatatgcgagcaaaattgtacccaattaaatgaaggaggatttatctgctcctgtacagctgggttcgaaaccaatgtttttgacagaacctcctgtctagatatcaatgaatgtgaacaatttgggacttgtccccagcactgcagaaataccaaaggaagttatgagtgtgtctgtgctgatggcttcacgtctatgagtgaccgccctggaaaacgatgtgcagctgagggtagctctcctttgttgctactgcctgacaatgtccgaattcgaaaatataatctctcatctgagaggttctcagagtatcttcaagatgaggaatatatccaagctgttgattatgattgggatcccaaggacataggcctcagtgttgtgtattacactgtgcgaggggagggctctaggtttggtgctatcaaacgtgcctacatccccaactttgaatccggccgcaataatcttgtgcaggaagttgacctgaaactgaaatacgtaatgcagccagatggaatagcagtggactgggttggaaggcatatttactggtcagatgtcaagaataaacgcattgaggtggctaaacttgatggaaggtacagaaagtggctgatttccactgacctggaccaaccagctgctattgctgtgaatcccaaactagggcttatgttctggactgactggggaaaggaacctaaaatcgagtctgcctggatgaatggagaggaccgcaacatcctggttttcgaggaccttggttggccaactggcctttctatcgattatttgaacaatgaccgaatctactggagtgacttcaaggaggacgttattgaaaccataaaatatgatgggactgataggagagtcattgcaaaggaagcaatgaacccttacagcctggacatctttgaagaccagttatactggatatctaaggaaaagggagaagtatggaaacaaaataaatttgggcaaggaaagaaagagaaaacgctggtagtgaacccttggctcactcaagttcgaatctttcatcaactcagatacaataagtcagtgcccaacctttgcaaacagatctgcagccacctctgccttctgagacctggaggatacagctgtgcctgtccccaaggctccagctttatagaggggagcaccactgagtgtgatgcagccatcgaactgcctatcaacctgccccccccatgcaggtgcatgcacggaggaaattgctattttgatgagactgacctccccaaatgcaagtgtcctagcggctacaccggaaaatattgtgaaatggcgttttcaaaaggcatctctccaggaacaaccgcagtagctgtgctgttgacaatcctcttgatcgtcgtaattggagctctggcaattgcaggattcttccactatagaaggaccggctcccttttgcctgctctgcccaagctgccaagcttaagcagtctcgtcaagccctctgaaaatgggaatggggtgaccttcagatcaggggcagatcttaacatggatattggagtgtctggttttggacctgagactgctattgacaggtcaatggcaatgagtgaagactttgtcatggaaatggggaagcagcccataatatttgaaaacccaatgtactcagccagagacagtgctgtcaaagtggttcagccaatccaggtgactgtatctgaaaatgtggataataagaattatggaagtcccataaacccttctgagatagttccagagacaaacccaacttcaccagctgctgatggaactcaggtgacaaaatggaatctcttcaaacgaaaatctaaacaaactaccaactttgaaaatccaatctatgcacagatggagaacgagcaaaaggaaagtgttgctgcgacaccacctccatcaccttcgctccctgctaagcctaagcctccttcgagaagagacccaactccaacctattctgcaacagaagacacttttaaagacaccgcaaatcttgttaaagaagactctgaagtatagctataccagctatttagggaataattagaaacacacttttgcacatatattttttacaaacagatgaaaaaagttaacattcagtactttatgaaaaaaatatatttttccctgtttgcctatagttggaggtatcctgtgtgtctttttttacttatgccgtctcatatttttacaaataattatcacaatgtactatatgtatatctttgcactgaagttgtctgaaggtaatactataaatatattgtatatttgtaaattttggaaagattatcctgttactgaatttgctaataaagatgtctgctgatttggttggtgatcattatagtaaatgatccaacaagaaaaggaattgactggggacctttagccgtgtctaaagaagaggcaccactcatatttcctataaaattatctaggaaaggaatccaggccccgctcttgggtccatttttacacattagcacttaattaatgttcaatattacatgtcaatttgattaatggctatgttgataggggccactatgtgttgtatagacatctggacttgactgtagactcctcagataatacagaaggtaggaaaagcaattcagtttggcccttctgtgtgttggcattgtctaaccagaactctctgtttcatgtgtgttctctcactagctgccaagacaacatttttatttgtgatgtctatgaggaaatcccatatcattaagtgccagtgtcctgcattgagtttgtggttaattaaatgagctcttctgctgatggaccctggagcaatttctcccctcacctgacattcaaggtggtcacctgccctagtagttggagctcagtagctgaatttctgaaaccaaatctgtgtcttcataaaataaggtgcaaaaaaaaaaaataccagttaagtaaagcctcaactgggtttttgtttctatgaaaatatcattataatcactatttatttcctaagttgaacctgaatagaaagggaaaccattcttattaagctttttattaggccctgtggctaaatgtgtacatttatattagaatgtactgtacagtccagatcttttctttaattcttattggttttttttttttttttttttttagagatggagtcttgctatattgccaaggctgatcttgaagtcctgggctcaagtgatcctcccacctcagcctcctgagtggttggggttacgggcgtgagccactgtgcctggcttccagctctcctcttaaatagtgggtatagtctgcacaacaggaaccatggcaggaatatacactttcccatagcaaatagcatacctgactctctgtgctaatattgcacatttgttaaacaatgaatgaatggatggatggatggatggatgaatgaatgaaacatatactactgattattttattccagagttctcaaaatatttgttgctgatattttgagtgctgactgtaattactttgattagataaacaactggaaataatgctgctgaaaaagttctaataaatgtgtattttatcaga

SEQ ID NO: 122 - RNA, 4007 nt, Homo sapiens
  source 1..4007: mol_type = other RNA
aggcttttggccactaggagctggcggaggtgcagacctaaaggagcgttcgctagcagaggcgctgccggtgcggtgtgctacgcgcgcccacctcccggggaaggaacggcgaggccggggaccgtcgcggagatggatcgcgggccggcagcagtggcgtgcacgctgctcctggctctcgtcgcctgcctagcgccggccagtggccaagaatgtgacagtgcgcattttcgctgtggaagtgggcattgcatccctgcagactggaggtgtgatgggaccaaagactgttcagatgacgcggatgaaattggctgcgctgttgtgacctgccagcagggctatttcaagtgccagagtgagggacaatgcatccccaactcctgggtgtgtgaccaagatcaagactgtgatgatggctcagatgaacgtcaagattgctcacaaagtacatgctcaagtcatcagataacatgctccaatggtcagtgtatcccaagtgaatacaggtgcgaccacgtcagagactgccccgatggagctgatgagaatgactgccagtacccaacatgtgagcagcttacttgtgacaatggggcctgctataacaccagtcagaagtgtgattggaaagttgattgcagggactcctcagatgaaatcaactgcactgagatatgcttgcacaatgagttttcatgtggcaatggagagtgtatccctcgtgcttatgtctgtgaccatgacaatgattgccaagacggcagtgacgaacatgcttgcaactatccgacctgcggtggttaccagttcacttgccccagtggccgatgcatttatcaaaactgggtttgtgatggagaagatgactgtaaagataatggagatgaagatggatgtgaaagcggtcctcatgatgttcataaatgttccccaagagaatggtcttgcccagagtcgggacgatgcatctccatttataaagtttgtgatgggattttagattgcccaggaagagaagatgaaaacaacactagtaccggaaaatactgtagtatgactctgtgctctgccttgaactgccagtaccagtgccatgagacgccgtatggaggagcgtgtttttgtcccccaggttatatcatcaaccacaatgacagccgtacctgtgttgagtttgatgattgccagatatggggaatttgtgaccagaagtgtgaaagccgacctggccgtcacctgtgccactgtgaagaagggtatatcttggagcgtggacagtattgcaaagctaatgattcctttggcgaggcctccattatcttctccaatggtcgggatttgttaattggtgatattcatggaaggagcttccggatcctagtggagtctcagaatcgtggagtggccgtgggtgtggctttccactatcacctgcaaagagttttttggacagacaccgtgcaaaataaggttttttcagttgacattaatggtttaaatatccaagaggttctcaatgtttctgttgaaaccccagagaacctggctgtggactgggttaataataaaatctatctagtggaaaccaaggtcaaccgcatagatatggtaaatttggatggaagctatcgggttacccttataactgaaaacttggggcatcctagaggaattgccgtggacccaactgttgggaagactgtagttcatggaggctccctcattcctcatccctttggagtaagcttatttgaaggtcaggtgttctttacagattggacaaagatggccgtgctgaaggcaaacaagttcacagagaccaacccacaagtgtactaccaggcttccctgaggccctatggagtgactgtttaccattccctcagacagccctatgctaccaatccgtgtaaagataacaatgggggctgtgagcaggtctgtgtcctcagccacagaacagataatgatggtttgggtttccgttgcaagtgcacattcggcttccaactggatacagatgagcgccactgcattggaagagaaattctcgcagctaacagggtggaaaatgttgaaagtttggcttttgattggatttcaaagaatctctattggacagactctcattacaagagtatcagtgtcatgaggctagctgataaaacgagacgcacagtagttcagtatttaaataacccacggtcggtggtagttcatccttttgccgggtatctattcttcactgattggttccgtcctgctaaaattatgagagcatggagtgacggatctcacctcttgcctgtaataaacactactcttggatggcccaatggcttggccatcgattgggctgcttcacgattgtactgggtagatgcctattttgataaaattgagcacagcacctttgatggtttagacagaagaagactgggccatatagagcagatgacacatccgtttggacttgccatctttggagagcatttattttttactgactggagactgggtgccattattcgagtcaggaaagcagatggtggagaaatgacagttatccgaagtggcattgcttacatactgcatttgaaatcgtatgatgtcaacatccagactggttctaacgcctgtaatcaacccacgcatcctaacggtgactgcagccacttctgcttcccggtgccaaatttccagcgagtgtgtgggtgcccttatggaatgaggctggcttccaatcacttgacatgcgagggggacccaaccaatgaaccacccacagagcagtgtggcttattttccttcccctgtaaaaatggcagatgtgtgcccaattactatctctgtgatggagtcgatgattgtcatgataacagtgatgagcaactatgtggcacacttaataatacctgttcatcttcggcgttcacctgtggccatggggagtgcattcctgcacactggcgctgtgacaaacgcaacgactgtgtggatggcagtgatgagcacaactgccccacccacgcacctgcttcctgccttgacacccaatacacctgtgataatcaccagtgtatctcaaagaactgggtctgtgacacagacaatgattgtggggatggatctgatgaaaagaactgcaattcgacagagacatgccaacctagtcagtttaattgccccaatcatcgatgtattgacctatcgtttgtctgtgatggtgacaaggattgtgttgatggatctgatgaggttggttgtgtattaaactgtactgcttctcaattcaagtgtgccagtggggataaatgtattggcgtcacaaatcgttgtgatggtgtttttgattgcagtgacaactcggatgaagcaggctgtccaaccaggcctcctggtatgtgccactcagatgaatttcagtgccaagaagatggtatctgcatcccgaacttctgggaatgtgatgggcatccagactgcctctatggatctgatgagcacaatgcctgtgtccccaagacttgcccttcatcatatttccactgtgacaacggaaactgcatccacagggcatggctctgtgatcgggacaatgactgcggggatatgagtgatgagaaggactgccctactcagccctttcgctgtcctagttggcaatggcagtgtcttggccataacatctgtgtgaatctgagtgtagtgtgtgatggcatctttgactgccccaatgggacagatgagtccccactttgcagtaagtttcctgaccacagtttactggccataaactcattctgaacagtagcctggtgtgcatcaccattgtcacagtcactgtgtagctttgtaggaaggatttcagttcctctatgagttcacatctgtgtagggggtaaccataattgaattcaaatacatcaccattggataattttctgattaaatcctttgtacttggttatgtgtttttacttctttttatgtctttgttt

SEQ ID NO: 123 - RNA, 14392 nt, Homo sapiens
  source 1..14392: mol_type = other RNA
gcagacctaaaggagcgttcgctagcagaggcgctgccggtgcggtgtgctacgcgcgcccacctcccggggaaggaacggcgaggccggggaccgtcgcggagatggatcgcgggccggcagcagtggcgtgcacgctgctcctggctctcgtcgcctgcctagcgccggccagtggccaagaatgtgacagtgcgcattttcgctgtggaagtgggcattgcatccctgcagactggaggtgtgatgggaccaaagactgttcagatgacgcggatgaaattggctgcgctgttgtgacctgccagcagggctatttcaagtgccagagtgagggacaatgcatccccagctcctgggtgtgtgaccaagatcaagactgtgatgatggctcagatgaacgtcaagattgctcacaaagtacatgctcaagtcatcagataacatgctccaatggtcagtgtatcccaagtgaatacaggtgcgaccacgtcagagactgccccgatggagctgatgagaatgactgccagtacccaacatgtgagcagcttacttgtgacaatggggcctgctataacaccagtcagaagtgtgattggaaagttgattgcagggactcctcagatgaaatcaactgcactgagatatgcttgcacaatgagttttcatgtggcaatggagagtgtatccctcgtgcttatgtctgtgaccatgacaatgattgccaagacggcagtgatgaacatgcttgcaactatccgacctgcggtggttaccagttcacttgccccagtggccgatgcatttatcaaaactgggtttgtgatggagaagatgactgtaaagataatggagatgaagatggatgtgaaagcggtcctcatgatgttcataaatgttccccaagagaatggtcttgcccagagtcgggacgatgcatctccatttataaagtttgtgatgggattttagattgcccaggaagagaagatgaaaacaacactagtaccggaaaatactgtagtatgactctgtgctctgccttgaactgccagtaccagtgccatgagacgccgtatggaggagcgtgtttttgtcccccaggttatatcatcaaccacaatgacagccgtacctgtgttgagtttgatgattgccagatatggggaatttgtgaccagaagtgtgaaagccgacctggccgtcacctgtgccactgtgaagaagggtatatcttggagcgtggacagtattgcaaagctaatgattcctttggcgaggcctccattatcttctccaatggtcgggatttgttaattggtgatattcatggaaggagcttccggatcctagtggagtctcagaatcgtggagtggccgtgggtgtggctttccactatcacctgcaaagagttttttggacagacaccgtgcaaaataaggttttttcagttgacattaatggtttaaatatccaagaggttctcaatgtttctgttgaaaccccagagaacctggctgtggactgggttaataataaaatctatctagtggaaaccaaggtcaaccgcatagatatggtaaatttggatggaagctatcgggttacccttataactgaaaacttggggcatcctagaggaattgccgtggacccaactgttggttatttatttttctcagattgggagagcctttctggggaacctaagctggaaagggcattcatggatggcagcaaccgtaaagacttggtgaaaacaaagctgggatggcctgctggggtaactctggatatgatatcgaagcgtgtttactgggttgactctcggtttgattacattgaaactgtaacttatgatggaattcaaaggaagactgtagttcatggaggctccctcattcctcatccctttggagtaagcttatttgaaggtcaggtgttctttacagattggacaaagatggccgtgctgaaggcaaacaagttcacagagaccaacccacaagtgtactaccaggcttccctgaggccctatggagtgactgtttaccattccctcagacagccctatgctaccaatccgtgtaaagataacaatgggggctgtgagcaggtctgtgttctcagccacagaacagataatgatggtttgggtttccgttgcaagtgcacattcggcttccaactggatacagatgagcgccactgcattgctgttcagaatttcctcattttttcatcccaagttgctattcgtgggatcccgttcaccttgtctacccaggaagatgtcatggttccagtttcggggaatccttctttctttgtcgggattgattttgacgcccaggacagcactatctttttttcagatatgtcaaaacacatgatttttaagcaaaagattgatggcacaggaagagaaattctcgcagctaacagggtggaaaatgttgaaagtttggcttttgattggatttcaaagaatctctattggacagactctcattacaagagtatcagtgtcatgaggctagctgataaaacgagacgcacagtagttcagtatttaaataacccacggtcggtggtagttcatccttttgccgggtatctattcttcactgattggttccgtcctgctaaaattatgagagcatggagtgacggatctcacctcttgcctgtaataaacactactcttggatggcccaatggcttggccatcgattgggctgcttcacgattgtactgggtagatgcctattttgataaaattgagcacagcacctttgatggtttagacagaagaagactgggccatatagagcagatgacacatccgtttggacttgccatctttggagagcatttattttttactgactggagactgggtgccattattcgagtcaggaaagcagatggtggagaaatgacagttatccgaagtggcattgcttacatactgcatttgaaatcgtatgatgtcaacatccagactggttctaacgcctgtaatcaacccacgcatcctaacggtgactgcagccacttctgcttcccggtgccaaatttccagcgagtgtgtgggtgcccttatggaatgaggctggcttccaatcacttgacatgcgagggggacccaaccaatgaaccacccacggagcagtgtggcttattttccttcccctgtaaaaatggcagatgtgtgcccaattactatctctgtgatggagtcgatgattgtcatgataacagtgatgagcaactatgtggcacacttaataatacctgttcatcttcggcgttcacctgtggccatggggagtgcattcctgcacactggcgctgtgacaaacgcaacgactgtgtggatggcagtgatgagcacaactgccccacccacgcacctgcttcctgccttgacacccaatacacctgtgataatcaccagtgtatctcaaagaactgggtctgtgacacagacaatgattgtggggatggatctgatgaaaagaactgcaattcgacagagacatgccaacctagtcagtttaattgccccaatcatcgatgtattgacctatcgtttgtctgtgatggtgacaaggattgtgttgatggatctgatgaggttggttgtgtattaaactgtactgcttctcaattcaagtgtgccagtggggataaatgtattggcgtcacaaatcgttgtgatggtgtttttgattgcagtgacaactcggatgaagcgggctgtccaaccaggcctcctggtatgtgccactcagatgaatttcagtgccaagaagatggtatctgcatcccgaacttctgggaatgtgatgggcatccagactgcctctatggatctgatgagcacaatgcctgtgtccccaagacttgcccttcatcatatttccactgtgacaacggaaactgcatccacagggcatggctctgtgatcgggacaatgactgcggggatatgagtgatgagaaggactgccctactcagccctttcgctgtcctagttggcaatggcagtgtcttggccataacatctgtgtgaatctgagtgtagtgtgtgatggcatctttgactgccccaatgggacagatgagtccccactttgcaatgggaacagctgctcagatttcaatggtggttgtactcacgagtgtgttcaagagccctttggggctaaatgcctatgtccattgggattcttacttgccaatgattctaagacctgtgaagacatagatgaatgtgatattctaggctcttgtagccagcactgttacaatatgagaggttctttccggtgctcgtgtgatacaggctacatgttagaaagtgatgggaggacttgcaaagttacagcatctgagagtctgctgttacttgtggcaagtcagaacaaaattattgccgacagtgtcacctcccaggtccacaatatctattcattggtcgagaatggttcttacattgtagctgttgattttgattcaattagtggtcgtatcttttggtctgatgcaactcagggtaaaacctggagtgcgtttcaaaatggaacggacagaagagtggtatttgacagtagcatcatcttgactgaaactattgcaatagattgggtaggtcgtaatctttactggacagactatgctctggaaacaattgaagtctccaaaattgatgggagccacaggactgtgctgattagtaaaaacctaacaaatccaagaggactagcattagatcccagaatgaatgagcatctactgttctggtctgactggggccaccaccctcgcatcgagcgagccagcatggacggcagcatgcgcactgtcattgtccaggacaagatcttctggccctgcggcttaactattgactaccccaacagactgctctacttcatggactcctatcttgattacatggacttttgcgattataatggacaccatcggagacaggtgatagccagtgatttgattatacggcacccctatgccctaactctctttgaagactctgtgtactggactgaccgtgctactcgtcgggttatgcgagccaacaagtggcatggagggaaccagtcagttgtaatgtataatattcaatggccccttgggattgttgcggttcatccttcgaaacaaccaaattccgtgaatccatgtgccttttcccgctgcagccatctctgcctgctttcctcacaggggcctcatttttactcctgtgtttgtccttcaggatggagtctgtctcctgatctcctgaattgcttgagagatgatcaacctttcttaataactgtaaggcaacatataatttttggaatctcccttaatcctgaggtgaagagcaatgatgctatggtccccatagcagggatacagaatggtttagatgttgaatttgatgatgctgagcaatacatctattgggttgaaaatccaggtgaaattcacagagtgaagacagatggcaccaacaggacagtatttgcttctatatctatggtggggccttctatgaacctggccttagattggatttcaagaaacctttattctaccaatcctagaactcagtcaatcgaggttttgacactccacggagatatcagatacagaaaaacattgattgccaatgatgggacagctcttggagttggctttccaattggcataactgttgatcctgctcgtgggaagctgtactggtcagaccaaggaactgacagtggggttcctgccaagatcgccagtgctaacatggatggcacatctgtgaaaactctctttactgggaacctcgaacacctggagtgtgtcactcttgacatcgaagagcagaaactctactgggcagtcactggaagaggagtgattgaaagaggaaacgtggatggaacagatcggatgatcctggtacaccagctttcccacccctggggaattgcagtccatgattctttcctttattatactgatgaacagtatgaggtcattgaaagagttgataaggccactggggccaacaaaatagtcttgagagataatgttccaaatctgaggggtcttcaagtttatcacagacgcaatgccgccgaatcctcaaatggctgtagcaacaacatgaatgcctgtcagcagatttgcctgcctgtaccaggaggattgttttcctgcgcctgtgccactggatttaaactcaatcctgataatcggtcctgctctccatataactctttcattgttgtttcaatgctgtctgcaatcagaggctttagcttggaattgtcagatcattcagaaaccatggtgccggtggcaggccaaggacgaaacgcactgcatgtggatgtggatgtgtcctctggctttatttattggtgtgattttagcagctcagtggcatctgataatgcgatccgtagaattaaaccagatggatcttctctgatgaacattgtgacacatggaataggagaaaatggagtccggggtattgcagtggattgggtagcaggaaatctttatttcaccaatgcctttgtttctgaaacactgatagaagttctgcggatcaatactacttaccgccgtgttcttcttaaagtcacagtggacatgcctaggcatattgttgtagatcccaagaacagatacctcttctgggctgactatgggcagagaccaaagattgagcgttctttccttgactgtaccaatcgaacagtgcttgtgtcagagggcattgtcacaccacggggcttggcagtggaccgaagtgatggctacgtttattgggttgatgattctttagatataattgcaaggattcgtatcaatggagagaactctgaagtgattcgttatggcagtcgttacccaactccttatggcatcactgtttttgaaaattctatcatatgggtagataggaatttgaaaaagatcttccaagccagcaaggaaccagagaacacagagccacccacagtgataagagacaatatcaactggctaagagatgtgaccatctttgacaagcaagtccagccccggtcaccagcagaggtcaacaacaacccttgcttggaaaacaatggtgggtgctctcatctctgctttgctctgcctggattgcacaccccaaaatgtgactgtgcctttgggaccctgcaaagtgatggcaagaattgtgccatttcaacagaaaatttcctcatctttgccttgtctaattccttgagaagcttacacttggaccctgaaaaccatagcccacctttccaaacaataaatgtggaaagaactgtcatgtctctagactatgacagtgtaagtgatagaatctacttcacacaaaatttagcctctggagttggacagatttcctatgccaccctgtcttcagggatccatactccaactgtcattgcttcaggtatagggactgctgatggcattgcctttgactggattactagaagaatttattacagtgactacctcaaccagatgattaattccatggctgaagatgggtctaaccgcactgtgatagcccgcgttccaaaaccaagagcaattgtgttagatccctgccaagggtacctgtactgggctgactgggatacacatgccaaaatcgagagagccacattgggaggaaacttccgggtacccattgtgaacagcagtctggtcatgcccagtgggctgactctggactatgaagaggaccttctctactgggtggatgctagtctgcagaggattgaacgcagcactctgacgggcgtggatcgtgaagtcattgtcaatgcagccgttcatgcttttggcttgactctctatggccagtatatttactggactgacttgtacacacaaagaatttaccgagctaacaaatatgacgggtcaggtcagattgcaatgaccacaaatttgctctcccagcccaggggaatcaacactgttgtgaagaaccagaaacaacagtgtaacaatccttgtgaacagtttaatgggggctgcagccatatctgtgcaccaggtccaaatggtgccgagtgccagtgtccacatgagggcaactggtatttggccaacaacaggaagcactgcattgtggacaatggtgaacgatgtggtgcatcttccttcacctgctccaatgggcgctgcatctcggaagagtggaagtgtgataatgacaacgactgtggggatggcagtgatgagatggaaagtgtctgtgcacttcacacctgctcaccgacagccttcacctgtgccaatgggcgatgtgtccaatactcttaccgctgtgattactacaatgactgtggtgatggcagtgatgaggcagggtgcctgttcagggactgcaatgccaccacggagtttatgtgcaataacagaaggtgcatacctcgtgagtttatctgcaatggtgtagacaactgccatgataataacacttcagatgagaaaaattgccctgatcgcacttgccagtctggatacacaaaatgtcataattcaaatatttgtattcctcgcgtttatttgtgtgacggagacaatgactgtggagataacagtgatgaaaaccctacttattgcaccactcacacatgcagcagcagtgagttccaatgcgcatctgggcgctgtattcctcaacattggtattgtgatcaagaaacagattgttttgatgcctctgatgaacctgcctcttgtggtcactctgagcgaacatgcctagctgatgagttcaagtgtgatggtgggaggtgcatcccaagcgaatggatctgtgacggtgataatgactgtggggatatgagtgacgaggataaaaggcaccagtgtcagaatcaaaactgctcggattccgagtttctctgtgtaaatgacagacctccggacaggaggtgcattccccagtcttgggtctgtgatggcgatgtggattgtactgacggctacgatgagaatcagaattgcaccaggagaacttgctctgaaaatgaattcacctgtggttacggactgtgtatcccaaagatattcaggtgtgaccggcacaatgactgtggtgactatagcgacgagaggggctgcttataccagacttgccaacagaatcagtttacctgtcagaacgggcgctgcattagtaaaaccttcgtctgtgatgaggataatgactgtggagacggatctgatgagctgatgcacctgtgccacaccccagaacccacgtgtccacctcacgagttcaagtgtgacaatgggcgctgcatcgagatgatgaaactctgcaaccacctagatgactgtttggacaacagcgatgagaaaggctgtggcattaatgaatgccatgacccttcaatcagtggctgcgatcacaactgcacagacaccttaaccagtttctattgttcctgtcgtcctggttacaagctcatgtctgacaagcggacttgtgttgatattgatgaatgcacagagatgccttttgtctgtagccagaagtgtgagaatgtaataggctcctacatctgtaagtgtgccccaggctacctccgagaaccagatggaaagacctgccggcaaaacagtaacatcgaaccctatctcatttttagcaaccgttactatttgagaaatttaactatagatggctatttttactccctcatcttggaaggactggacaatgttgtggcattagattttgaccgagtagagaagagattgtattggattgatacacagaggcaagtcattgagagaatgtttctgaataagacaaacaaggagacaatcataaaccacagactaccagctgcagaaagtctggctgtagactgggtttccagaaagctctactggttggatgcccgcctggatggcctctttgtctctgacctcaatggtggacaccgccgcatgctggcccagcactgtgtggatgccaacaacaccttctgctttgataatcccagaggacttgcccttcaccctcaatatgggtacctctactgggcagactggggtcaccgcgcatacattgggagagtaggcatggatggaaccaacaagtctgtgataatctccaccaagttagagtggcctaatggcatcaccattgattacaccaatgatctactctactgggcagatgcccacctgggttacatagagtactctgatttggagggccaccatcgacacacggtgtatgatggggcactgcctcaccctttcgctattaccatttttgaagacactatttattggacagattggaatacaaggacagtggaaaagggaaacaaatatgatggatcaaatagacagacactggtgaacacaacacacagaccatttgacatccatgtgtaccatccatataggcagcccattgtgagcaatccctgtggtaccaacaatggtggctgttctcatctctgcctcatcaagccaggaggaaaagggttcacttgcgagtgtccagatgacttccgcacccttcaactgagtggcagcacctactgcatgcccatgtgctccagcacccagttcctgtgcgctaacaatgaaaagtgcattcctatctggtggaaatgtgatggacagaaagactgctcagatggctctgatgaactggccctttgcccgcagcgcttctgccgactgggacagttccagtgcagtgacggcaactgcaccagcccgcagactttatgcaatgctcaccaaaattgccctgatgggtctgatgaagaccgtcttctttgtgagaatcaccactgtgactccaatgaatggcagtgcgccaacaaacgttgcatcccagaatcctggcagtgtgacacatttaacgactgtgaggataactcagatgaagacagttcccactgtgccagcaggacctgccggccgggccagtttcggtgtgctaatggccgctgcatcccgcaggcctggaagtgtgatgtggataatgattgtggagaccactcggatgagcccattgaagaatgcatgagctctgcccatctctgtgacaacttcacagaattcagctgcaaaacaaattaccgctgcatcccaaagtgggccgtgtgcaatggtgtagatgactgcagggacaacagtgatgagcaaggctgtgaggagaggacatgccatcctgtgggggatttccgctgtaaaaatcaccactgcatccctcttcgttggcagtgtgatgggcaaaatgactgtggagataactcagatgaggaaaactgtgctccccgggagtgcacagagagcgagtttcgatgtgtcaatcagcagtgcattccctcgcgatggatctgtgaccattacaacgactgtggggacaactcagatgaacgggactgtgagatgaggacctgccatcctgaatattttcagtgtacaagtggacattgtgtacacagtgaactgaaatgcgatggatccgctgactgtttggatgcgtctgatgaagctgattgtcccacacgctttcctgatggtgcatactgccaggctactatgttcgaatgcaaaaaccatgtttgtatcccgccatattggaaatgtgatggcgatgatgactgtggcgatggttcagatgaagaacttcacctgtgcttggatgttccctgtaattcaccaaaccgtttccggtgtgacaacaatcgctgcatttatagtcatgaggtgtgcaatggtgtggatgactgtggagatggaactgatgagacagaggagcactgtagaaaaccgacccctaaaccttgtacagaatatgaatataagtgtggcaatgggcattgcattccacatgacaatgtgtgtgatgatgccgatgactgtggtgactggtccgatgaactgggttgcaataaaggaaaagaaagaacatgtgctgaaaatatatgcgagcaaaattgtacccaattaaatgaaggaggatttatctgctcctgtacagctgggttcgaaaccaatgtttttgacagaacctcctgtctagatatcaatgaatgtgaacaatttgggacttgtccccagcactgcagaaataccaaaggaagttatgagtgtgtctgtgctgatggcttcacgtctatgagtgaccgccctggaaaacgatgtgcagctgagggtagctctcctttgttgctactgcctgacaatgtccgaattcgaaaatataatctctcatctgagaggttctcagagtatcttcaagatgaggaatatatccaagctgttgattatgattgggatcccaaggacataggcctcagtgttgtgtattacactgtgcgaggggagggctctaggtttggtgctatcaaacgtgcctacatccccaactttgaatccggccgcaataatcttgtgcaggaagttgacctgaaactgaaatacgtaatgcagccagatggaatagcagtggactgggttggaaggcatatttactggtcagatgtcaagaataaacgcattgaggtggctaaacttgatggaaggtacagaaagtggctgatttccactgacctggaccaaccagctgctattgctgtgaatcccaaactagggcttatgttctggactgactggggaaaggaacctaaaatcgagtctgcctggatgaatggagaggaccgcaacatcctggttttcgaggaccttggttggccaactggcctttctatcgattatttgaacaatgaccgaatctactggagtgacttcaaggaggacgttattgaaaccataaaatatgatgggactgataggagagtcattgcaaaggaagcaatgaacccttacagcctggacatctttgaagaccagttatactggatatctaaggaaaagggagaagtatggaaacaaaataaatttgggcaaggaaagaaagagaaaacgctggtagtgaacccttggctcactcaagttcgaatctttcatcaactcagatacaataagtcagtgcccaacctttgcaaacagatctgcagccacctctgccttctgagacctggaggatacagctgtgcctgtccccaaggctccagctttatagaggggagcaccactgagtgtgatgcagccatcgaactgcctatcaacctgccccccccatgcaggtgcatgcacggaggaaattgctattttgatgagactgacctccccaaatgcaagtgtcctagcggctacaccggaaaatattgtgaaatggcgttttcaaaaggcatctctccaggaacaaccgcagtagctgtgctgttgacaatcctcttgatcgtcgtaattggagctctggcaattgcaggattcttccactatagaaggaccggctcccttttgcctgctctgcccaagctgccaagcttaagcagtctcgtcaagccctctgaaaatgggaatggggtgaccttcagatcaggggcagatcttaacatggatattggagtgtctggttttggacctgagactgctattgacaggtcaatggcaatgagtgaagactttgtcatggaaatggggaagcagcccataatatttgaaaacccaatgtactcagccagagacagtgctgtcaaagtggttcagccaatccaggtgactgtatctgaaaatgtggataataagaattatggaagtcccataaacccttctgagatagttccagagacaaacccaacttcaccagctgctgatggaactcaggtgacaaaatggaatctcttcaaacgaaaatctaaacaaactaccaactttgaaaatccaatctatgcacagatggagaacgagcaaaaggaaagtgttgctgcgacaccacctccatcaccttcgctccctgctaagcctaagcctccttcgagaagagacccaactccaacctattctgcaacagaagacacttttaaagacaccgcaaatcttgttaaagaagactctgaagtatagctataccagctatttagggaataattagaaacacacttttgcacatatattttttacaaacagatgaaaaaagttaacattcagtactttatgaaaaaaatatatttttccctgtttgcctataggtggaggtatcctgtgtgtctttttttacttatgccgtctcatatttttacaaataattatcacaatgtactatatgtatatctttgcactgaagttgtctgaaggtaatactataaatatattgtatatttgtaaattttggaaagattatcctgttactgaatttgctaataaagatgtctgctgaaaaaaaa

SEQ ID NO: 124 - RNA, 14044 nt, Homo sapiens
  source 1..14044: mol_type = other RNA
tgcggtgtgctacgcgcgcccacctcccggggaaggaacggcgaggccggggaccgtcgcggagatggatcgcgggccggcagcagtggcgtgcacgctgctcctggctctcgtcgcctgcctagccccggccagtggccaagaatgtgacagtgcgcattttcgctgtggaagtgggcattgcatccctgcagactggaggtgtgatgggaccaaagactgttcagatgacgcggatgaaattggctgcgctgttgtgacctgccagcagggctatttcaagtgccagagtgagggacaatgcatccccagctcctgggtgtgtgaccaagatcaagactgtgatgatggctcagatgaacgtcaagattgctcacaaagtacatgctcaagtcatcagataacatgctccaatggtcagtgtatcccaagtgaatacaggtgcgaccacgtcagagactgccccgatggagctgatgagaatgactgccagtacccaacatgtgagcagcttacttgtgacaatggggcctgctataacaccagtcagaagtgtgattggaaagttgattgcagggactcctcagatgaaatcaactgcactgagatatgcttgcacaatgagttttcatgtggcaatggagagtgtatccctcgtgcttatgtctgtgaccatgacaatgattgccaagacggcagtgacgaacatgcttgcaactatccgacctgcggtggttaccagttcacttgccccagtggccgatgcatttatcaaaactgggtttgtgatggagaagatgactgtaaagataatggagatgaagatggatgtgaaagcggtcctcatgatgttcataaatgttccccaagagaatggtcttgcccagagtcgggacgatgcatctccatttataaagtttgtgatgggattttagattgcccaggaagagaagatgaaaacaacactagtaccggaaaatactgtagtatgactctgtgctctgccttgaactgccagtaccagtgccatgagacgccgtatggaggagcgtgtttttgtcccccaggttatatcatcaaccacaatgacagccgtacctgtgttgagtttgatgattgccagatatggggaatttgtgaccagaagtgtgaaagccgacctggccgtcacctgtgccactgtgaagaagggtatatcttggagcgtggacagtattgcaaagctaatgattcctttggcgaggcctccattatcttctccaatggtcgggatttgttaattggtgatattcatggaaggagcttccggatcctagtggagtctcagaatcgtggagtggccgtgggtgtggctttccactatcacctgcaaagagttttttggacagacaccgtgcaaaataaggttttttcagttgacattaatggtttaaatatccaagaggttctcaatgtttctgttgaaaccccagagaacctggctgtggactgggttaataataaaatctatctagtggaaaccaaggtcaaccgcatagatatggtaaatttggatggaagctatcgggttacccttataactgaaaacttggggcatcctagaggaattgccgtggacccaactgttggttatttatttttctcagattgggagagcctttctggggaacctaagctggaaagggcattcatggatggcagcaaccgtaaagacttggtgaaaacaaagctgggatggcctgctggggtaactctggatatgatatcgaagcgtgtttactgggttgactctcggtttgattacattgaaactgtaacttatgatggaattcaaaggaagactgtagttcatggaggctccctcattcctcatccctttggagtaagcttatttgaaggtcaggtgttctttacagattggacaaagatggccgtgctgaaggcaaacaagttcacagagaccaacccacaagtgtactaccaggcttccctgaggccctatggagtgactgtttaccattccctcagacagccctatgctaccaatccgtgtaaagataacaatgggggctgtgagcaggtctgtgtyctcagccacagaacagataatgatggtttgggtttccgttgcaagtgcacattcggcttccaactggatacagatgagcgccactgcattgctgttcagaatttcctcattttttcatcccaagttgctattcgtgggatcccgttcaccttgtctacccaggaagatgtcatggttccagtttcggggaatccttctttctttgtcgggattgattttgacgcccaggacagcactatctttttttcagatatgtcaaaacacatgatttttaagcaaaagattgatggcacaggaagagaaattctcgcagctaacagggtggaaaatgttgaaagtttggcttttgattggatttcaaagaatctctattggacagactctcattacaagagtatcagtgtcatgaggctagctgataaaacgagacgcacggtagttcagtatttaaataacccacggtcggtggtagttcatccttttgccgggtatctattcttcactgattggttccgtcctgctaaaattatgagagcatggagtgacggatctcacctcttgcctgtaataaacactactcttggatggcccaatggcttggccatcgattgggctgcttcacgattgtactgggtagatgcctattttgataaaattgagcacagcacctttgatggtttagacagaagaagactgggccatatagagcagatgacacatccgtttggacttgccatctttggagagcatttattttttactgactggagactgggtgccattattcgagtcaggaaagcagatggtggagaaatgacagttatccgaagtggcattgcttacatactgcatttgaaatcgtatgatgtcaacatccagactggttctaacgcctgtaatcaacccacgcatcctaacggtgactgcagccacttctgcttcccggtgccaaatttccagcgagtgtgtgggtgcccttatggaatgaggctggcttccaatcacttgacatgcgagggggacccaacmaatgaaccacccacggagcagtgtggcttattttccttcccctgtaaaaatggcagatgtgtgcccaattactatctctgtgatggagtcgatgattgtcatgataacagtgatgagcaactatgtggcacacttaataatacctgttcatcttcggcgttcacctgtggccatggggagtgcattcctgcacactggcgctgtgacaaacgcaacgactgtgtggatggcagtgatgagcacaactgccccacccacgcacctgcttcctgccttgacacccaatacacctgtgataatcaccagtgtatctcaaagaactgggtctgtgacacagacaatgattgtggggatggatctgatgaaaagaactgcaattcgacagagacatgccaacctagtcagtttaattgccccaatcatcgatgtattgacctatcgtttgtctgtgatggtgacaaggattgtgttgatggatctgatgaggttggttgtgtattaaactgtactgcttctcaattcaagtgtgccagtggggataaatgtattggcgtcacaaatcgttgtgatggtgtttttgattgcagtgacaactcggatgaagcgggctgtccaaccaggcctcctggtatgtgccactcagatgaatttcagtgccaagaagatggtatctgcatcccgaacttctgggaatgtgatgggcatccagactgcctctatggatctgatgagcacaatgcctgtgtccccaagacttgcccttcatcatatttccactgtgacaacggaaactgcatccacagggcatggctctgtgatcgggacaatgactgcggggatatgagtgatgagaaggactgccctactcagccctttcgctgtcctagttggcaatggcagtgtcttggccataacatctgtgtgaatctgagtgtagtgtgtgatggcatctttgactgccccaatgggacagatgagtccccactttgcaatgggaacagctgctcagatttcaatggtggttgtactcacgagtgtgttcaagagccctttggggctaaatgcctatgtccattgggattcttacttgccaatgattctaagacctgtgaagacatagatgaatgtgatattctaggctcttgtagccagcactgttacaatatgagaggttctttccggtgctcgtgtgatacaggctacatgttagaaagtgatgggaggacttgcaaagttacagcatctgagagtctgctgttacttgtggcaagtcagaacaaaattattgccgacagtgtcacctcccaggtccacaatatctattcattggtcgagaatggttcttacattgtagctgttgattttgattcaattagtggtcgtatcttttggtctgatgcaactcagggtaaaacctggagtgcgtttcaaaatggaacggacagaagagtggtatttgacagtagcatcatcttgactgaaactattgcaatagattgggtaggtcgtaatctttactggacagactatgctctggaaacaattgaagtctccaaaattgatgggagccacaggactgtgctgattagtaaaaacctaacaaatccaagaggactagcattagatcccagaatgaatgagcatctactgttctggtctgactggggccaccaccctcgcatcgagcgagccagcatggacggcagcatgcgcactgtcattgtccaggacaagatcttctggccctgcggcttaactattgactaccccaacagactgctctacttcatggactcctatcttgattacatggacttttgtgattataatggacaccatcggagacaggtgatagccagtgatttgattatacggcacccctatgccctaactctctttgaagactctgtgtactggactgaccgtgctactcgtcgggttatgcgagccaacaagtggcatggagggaaccagtcagttgtaatgtataatattcaatggccccttgggattgttgcggttcatccttcgaaacaaccaaattccgtgaatccatgtgccttttcccgctgcagccatctctgcctgctttcctcacaggggcctcatttttactcctgtgtttgtccttcaggatggagtctgtctcctgatctcctgaattgcttgagagatgatcaacctttcttaataactgtaaggcaacatataatttttggaatctcccttaatcctgaggtgaagagcaatgatgctatggtccccatagcagggatacagaatggtttagatgttgaatttgatgatgctgagcaatacatctattgggttgaaaatccaggtgaaattcacagagtgaagacagatggcaccaacaggacagtatttgcttctatatctatggtggggccttctatgaacctggccttagattggatttcaagaaacctttattctaccaatcctagaactcagtcaatcgaggttttgacactccacggagatatcagatacagaaaaacattgattgccaatgatgggacagctcttggagttggctttccaattggcataactgttgatcctgctcgtgggaagctgtactggtcagaccaaggaactgacagtggggttcctgccaagatcgccagtgctaacatggatggcacatctgtgaaaactctctttactgggaacctcgaacacctggagtgtgtcactcttgacatcgaagagcagaaactctactgggcagtcactggaagaggagtgattgaaagaggaaacgtggatggaacagatcgaatgatcctggtacaccagctttcccacccctggggaattgcagtccatgattctttcctttattatactgatgaacagtatgaggtcattgaaagagttgataaggccactggggccaacaaaatagtcttgagagataatgttccaaatctgaggggtcttcaagtttatcacagacgcaatgccgccgaatcctcaaatggctgtagcaacaacatgaatgcctgtcagcagatttgcctgcctgtaccaggaggattgttttcctgcgcctgtgccactggatttaaactcaatcctgataatcggtcctgctctccatataactctttcattgttgtttcaatgctgtctgcaatcagaggctttagcttggaattgtcagatcattcagaaaccatggtgccggtggcaggccaaggacgaaacgcactgcatgtggatgtggatgtgtcctctggctttatttattggtgtgattttagcagctcagtggcatctgataatgcgatccgtagaattaaaccagatggatcttctctgatgaacattgtgacacatggaataggagaaaatggagtccggggtattgcagtggattgggtagcaggaaatctttatttcaccaatgcctttgtttctgaaacactgatagaagttctgcggatcaatactacttaccgccgtgttcttcttaaagtcacagtggacatgcctaggcatattgttgtagatcccaagaacagatacctcttctgggctgactatgggcagagaccaaagattgagcgttctttccttgactgtaccaatcgaacagtgcttgtgtcagagggcattgtcacaccacggggcttggcagtggaccgaagtgatggctacgtttattgggttgatgattctttagatataattgcaaggattcgtatcaatggagagaactctgaagtgattcgttatggcagtcgttacccaactccttatggcatcactgtttttgaaaattctatcatatgggtagataggaatttgaaaaagatcttccaagccagcaaggaaccagagaacacagagccacccacagtgataagagacaatatcaactggctaagagatgtgaccatctttgacaagcaagtccagccccggtcaccagcagaggtcaacaacaacccttgcttggaaaacaatggtgggtgctctcatctctgctttgctctgcctggattgcacaccccaaaatgtgactgtgcctttgggaccctgcaaagtgatggcaagaattgtgccatttcaacagaaaatttcctcatctttgccttgtctaattccttgagaagcttacacttggaccctgaaaaccatagcccacctttccaaacaataaatgtggaaagaactgtcatgtctctagactatgacagtgtaagtgatagaatctacttcacacaaaatttagcctctggagttggacagatttcctatgccaccctgtcttcagggatccatactccaactgtcattgcttcaggtatagggactgctgatggcattgcctttgactggattactagaagaatttattacagtgactacctcaaccagatgattaattccatggctgaagatgggtctaaccgcactgtgatagcccgcgttccaaaaccaagagcaattgtgttagatccctgccaagggtacctgtactgggctgactgggatacacatgccaaaatcgagagagccacattgggaggaaacttccgcgtacccattgtgaacagcagtctggtcatgcccagtgggctgactctggactatgaagaggaccttctctactgggtggatgctagtctgcagaggattgaacgcagcactctgacgggcgtggatcgtgaagtcattgtcaatgcagccgttcatgcttttggcttgactctctatggccagtatatttactggactgacttgtacacacaaagaatttaccgagctaacaaatatgacgggtcaggtcagattgcaatgaccacaaatttgctctcccagcccaggggaatcaacactgttgtgaagaaccagaaacaacagtgtaacaatccttgtgaacagtttaatgggggctgcagccatatctgtgcaccaggtccaaatggtgccgagtgccagtgtccacatgagggcaactggtatttggccaacaacaggaagcactgcattgtggacaatggtgaacgatgtggtgcatcttccttcacctgctccaatgggcgctgcatctcggaagagtggaagtgtgataatgacaacgactgtggggatggcagtgatgagatggaaagtgtctgtgcacttcacacctgctcaccgacagccttcacctgtgccaatgggcgatgtgtccaatactcttaccgctgtgattactacaatgactgtggtgatggcagtgatgaggcagggtgcctgttcagggactgcaatgccaccacggagtttatgtgcaataacagaaggtgcatacctcgtgagtttatctgcaatggtgtagacaactgccatgataataacacttcagatgagaaaaattgccctgatcgcacttgccagtctggatacacaaaatgtcataattcaaatatttgtattcctcgcgtttatttgtgtgacggagacaatgactgtggagataacagtgatgaaaaccctacttattgcaccactcacacgtgcagcagcagtgagttccaatgcgcatctgggcgctgtattcctcaacattggtattgtgatcaagaaacagattgttttgatgcctctgatgaacctgcctcttgtggtcactctgagcgaacatgcctagctgatgagttcaagtgtgatggtgggaggtgcatcccaagcgaatggatctgtgacggtgataatgactgtggggatatgagtgacgaggataaaaggcaccagtgtcagaatcaaaactgctcggattccgagtttctctgtgtaaatgacagacctccggacaggaggtgcattccccagtcttgggtctgtgatggcgatgtggattgtactgacggctacgatgagaatcagaattgcaccaggagaacttgctctgaaaatgaattcacctgtggttacggactgtgtatcccaaagatattcaggtgtgaccggcacaatgactgtggtgactatagcgacgagaggggctgcttataccagacttgccaacagaatcagtttacctgtcagaacgggcgctgcattagtaaaaccttcgtctgtgatgaggataatgactgtggagacggatctgatgagctgatgcacctgtgccacaccccagaacccacgtgtccacctcacgagttcaagtgtgacaatgggcgctgcatcgagatgatgaaactctgcaaccacctagatgactgtttggacaacagcgatgagaaaggctgtggcattaatgaatgccatgacccttcaatcagtggctgcgatcacaactgcacagacaccttaaccagtttctattgttcctgtcgtcctggttacaagctcatgtctgacaagcggacttgtgttgatattgatgaatgcacagagatgccttttgtctgtagccagaagtgtgagaatgtaataggctcctacatctgtaagtgtgccccaggctacctccgagaaccagatggaaagacctgccggcaaaacagtaacatcgaaccctatctcatttttagcaaccgttactatttgagaaatttaactatagatggctatttttactccctcatcttggaaggactggacaatgttgtggcattagattttgaccgagtagagaagagattgtattggattgatacacagaggcaagtcattgagagaatgtttctgaataagacaaacaaggagacaatcataaaccacagactaccagctgcagaaagtctggctgtagactgggtttccagaaagctctactggttggatgcccgcctggatggcctctttgtctctgacctcaatggtggacaccgccgcatgctggcccagcactgtgtggatgccaacaacaccttctgctttgataatcccagaggacttgcccttcaccctcaatatgggtacctctactgggcagactggggtcaccgcgcatacattgggagagtaggcatggatggaaccaacaagtctgtgataatctccaccaagttagagtggcctaatggcatcaccattgattacaccaatgatctactctactgggcagatgcccacctgggttacatagagtactctgatttggagggccaccatcgacacacggtgtatgatggggcactgcctcaccctttcgctattaccatttttgaagacactatttattggacagattggaatacaaggacagtggaaaagggaaacaaatatgatggatcaaatagacagacactggtgaacacaacacacagaccatttgacatccatgtgtaccatccatataggcagcccattgtgagcaatccctgtggtaccaacaatggtggctgttctcatctctgcctcatcaagccaggaggaaaagggttcacttgcgagtgtccagatgacttccgcacccttcaactgagtggcagcacctactgcatgcccatgtgctccagcacccagttcctgtgcgctaacaatgaaaagtgcattcctatctggtggaaatgtgatggacagaaagactgctcagatggctctgatgaactggccctttgcccgcagcgcttctgccgactgggacagttccagtgcagtgacggcaactgcaccagcccgcagactttatgcaatgctcaccaaaattgccctgatgggtctgatgaagaccgtcttctttgtgagaatcaccactgtgactccaatgaatggcagtgcgccaacaaacgttgcatcccagaatcctggcagtgtgacacatttaacgactgtgaggataactcagatgaagacagttcccactgtgccagcaggacctgccggccgggccagtttcggtgtgctaatggccgctgcatcccgcaggcctggaagtgtgatgtggataatgattgtggagaccactcggatgagcccattgaagaatgcatgagctctgcccatctctgtgacaacttcacagaattcagctgcaaaacaaattaccgctgcatcccaaagtgggccgtgtgcaatggtgtagatgactgcagggacaacagtgatgagcaaggctgtgaggagaggacatgccatcctgtgggggatttccgctgtaaaaatcaccactgcatccctcttcgttggcagtgtgatgggcaaaatgactgtggagataactcagatgaggaaaactgtgctccccgggagtgcacagagagcgagtttcgatgtgtcaatcagcagtgcattccctcgcgatggatctgtgaccattacaacgactgtggggacaactcagatgaacgggactgtgagatgaggacctgccatcctgaatattttcagtgtacaagtggacattgtgtacacagtgaactgaaatgcgatggatccgctgactgtttggatgcgtctgatgaagctgattgtcccacacgctttcctgatggtgcatactgccaggctactatgttcgaatgcaaaaaccatgtttgtatcccgccatattggaaatgtgatggcgatgatgactgtggcgatggttcagatgaagaacttcacctgtgcttggatgttccctgtaattcaccaaaccgtttccggtgtgacaacaatcgctgcatttatagtcatgaggtgtgcaatggtgtggatgactgtggagatggaactgatgagacagaggagcactgtagaaaaccgacccctaaaccttgtacagaatatgaatataagtgtggcaatgggcattgcattccacatgacaatgtgtgtgatgatgccgatgactgtggtgactggtccgatgaactgggttgcaataaaggaaaagaaagaacatgtgctgaaaatatatgcgagcaaaattgtacccaattaaatgaaggaggatttatctgctcctgtacagctgggttcgaaaccaatgtttttgacagaacctcctgtctagatatcaatgaatgtgaacaatttgggacttgtccccagcactgcagaaataccaaaggaagttatgagtgtgtctgtgctgatggcttcacgtctatgagtgaccgccctggaaaacgatgtgcagctgagggtagctctcctttgttgctactgcctgacaatgtccgaattcgaaaatataatctctcatctgagaggttctcagagtatcttcaagatgaggaatatatccaagctgttgattatgattgggatcccgaggacataggcctcagtgttgtgtattacactgtgcgaggggagggctctaggtttggtgctatcaaacgtgcctacatccccaactttgaatccggccgcaataatcttgtgcaggaagttgacctgaaactgaaatacgtaatgcagccagatggaatagcagtggactgggttggaaggcatatttactggtcagatgtcaagaataaacgcattgaggtggctaaacttgatggaaggtacagaaagtggctgatttccactgacctggaccaaccagctgctattgctgtgaatcccaaactagggcttatgttctggactgactggggaaaggaacctaaactcgagtctgcctggatgaatggagaggaccgcaacatcctggttttcgaggaccttggttggccaactggcctttctatcgattatttgaacaatgaccgaatctactggagtgacttcaaggaggacgttattgaaaccataaaatatgatgggactgataggagagtcattgcaaaggaagcaatgaacccttacagcctggacatctttgaagaccagttatactggatatctaaggaaaagggagaagtatggaaacaaaataaatttgggcaaggaaagaaagagaaaacgctggtagtgaacccttggctcactcaagttcgaatctttcatcaactcagatacaataagtcagtgcccaacctttgcaaacagatctgcagccacctctgccttctgagacctggaggatacagctgtgcctgtccccaaggctccagctttatagaggggagcaccactgagtgtgatgcagccattgaactgcctatcaacctgccccccccatgcaggtgcatgcacggaggaaattgctattttgatgagactgacctccccaaatgcaagtgtcctagcggctacaccggaaaatattgtgaaatggcgttttcaaaaggcatctctccaggaacaaccgcagtagctgtgctgttgacaatcctcttgatcgtcgtaattggagctctggcaattgcaggattcttccactatagaaggaccggctcccttttgcctgctctgcccaagctgccaagcttaagcagtctcgtcaagccctctgaaaatgggaatggggtgaccttcagatcaggggcagatcttaacatggatattggagtgtctggttttggacctgagactgctattgacaggtcaatggcaatgagtgaagactttgtcatggaaatggggaagcagcccataatatttgaaaacccaatgtactcagccagagacagtgctgtcaaagtggttcagccaatccaggtgactgtatctgaaaatgtggataataagaattatggaagtcccataaacccttctgagatagttccagagacaaacccaacttcaccagctgctgatggaactcaggtgacaaaatggaatctcttcaaacgaaaatctaaacaaactaccaactttgaaaatccaatctatgcacagatggagaacgagcaaaaggaaagtgttgctgcgacaccacctccatcaccttcgctccctgctaagcctaagcctccttcgagaagagacccaactccaacctattctgcaacagaagacacttttaaagacaccgcaaatcttgttaaagaagactctgaagtatagctataccagcta

SEQ ID NO: 125 - RNA, 14042 nt, Homo sapiens
  source 1..14042: mol_type = other RNA
cggtgcggtgtgctacgcgcgcccacctcccggggaaggaacggcgaggccggggaccgtcgcggagatggatcgcgggccggcagcagtggcgtgcacgctgctcctggctctcgtcgcctgcctagccccggccagtggccaagaatgtgacagtgcgcattttcgctgtggaagtgggcattgcatccctgcagactggaggtgtgatgggaccaaagactgttcagatgacgcggatgaaattggctgcgctgttgtgacctgccagcagggctatttcaagtgccagagtgagggacaatgcatccccagctcctgggtgtgtgaccaagatcaagactgtgatgatggctcagatgaacgtcaagattgctcacaaagtacatgctcaagtcatcagataacatgctccaatggtcagtgtatcccaagtgaatacaggtgcgaccacgtcagagactgccccgatggagctgatgagaatgactgccagtacccaacatgtgagcagcttacttgtgacaatggggcctgctataacaccagtcagaagtgtgattggaaagttgattgcagggactcctcagatgaaatcaactgcactgagatatgcttgcacaatgagttttcatgtggcaatggagagtgtatccctcgtgcttatgtctgtgaccatgacaatgattgccaagacggcagtgaygaacatgcttgcaactatccgacctgcggtggttaccagttcacttgccccagtggccgatgcatttatcaaaactgggtttgtgatggagaagatgactgtaaagataatggagatgaagatggatgtgaaagcggtcctcatgatgttcataaatgttccccaagagaatggtcttgcccagagtcgggacgatgcatctccatttataaagtttgtgatgggattttagattgcccaggaagagaagatgaaaacaacactagtaccggaaaatactgtagtatgactctgtgctctgccttgaactgccagtaccagtgccatgagacgccgtatggaggagcgtgtttttgtcccccaggttatatcatcaaccacaatgacagccgtacctgtgttgagtttgatgattgccagatatggggaatttgtgaccagaagtgtgaaagccgacctggccgtcacctgtgccactgtgaagaagggtatatcttggagcgtggacagtattgcaaagctaatgattcctttggcgaggcctccattatcttctccaatggtcgggatttgttaattggtgatattcatggaaggagcttccggatcctagtggagtctcagaatcgtggagtggccgtgggtgtggctttccactatcacctgcaaagagttttttggacagacaccgtgcaaaataaggttttttcagttgacattaatggtttaaatatccaagaggttctcaatgtttctgttgaaaccccagagaacctggctgtggactgggttaataataaaatctatctagtggaaaccaaggtcaaccgcatagatatggtaaatttggatggaagctatcgggttacccttataactgaaaacttggggcatcctagaggaattgccgtggacccaactgttggttatttatttttctcagattgggagagcctttctggggaacctaagctggaaagggcattcatggatggcagcaaccgtaaagacttggtgaaaacaaagctgggatggcctgctggggtaactctggatatgatatcgaagcgtgtttactgggttgactctcggtttgattacattgaaactgtaacttatgatggaattcaaaggaagactgtagttcatggaggctccctcattcctcatccctttggagtaagcttatttgaaggtcaggtgttctttacagattggacaaagatggccgtgctgaaggcaaacaagttcacagagaccaacccacaagtgtactaccaggcttccctgaggccctatggagtgactgtttaccattccctcagacagccctatgctaccaatccgtgtaaagataacaatgggggctgtgagcaggtctgtgtyctcagccacagaacagataatgatggtttgggtttccgttgcaagtgcacattcggcttccaactggatacagatgagcgccactgcattgctgttcagaatttcctcattttttcatcccaagttgctattcgtgggatcccgttcaccttgtctacccaggaagatgtcatggttccagtttcggggaatccttctttctttgtcgggattgattttgacgcccaggacagcactatctttttttcagatatgtcaaaacacatgatttttaagcaaaagattgatggcacaggaagagaaattctcgcagctaacagggtggaaaatgttgaaagtttggcttttgactggatttcaaagaatctctattggacagactctcattacaagagtatcagtgtcatgaggctagctgataaaacgagacgcacggtagttcagtatttaaataacccacggtcggtggtagttcatccttttgccgggtatctattcttcactgattggttccgtcctgctaaaattatgagagcatggagtgacggatctcacctcttgcctgtaataaacactactcttggatggcccaatggcttggccatcgattgggctgcttcacgattgtactgggtagatgcctattttgataaaattgagcacagcacctttgatggtttagacagaagaagactgggccatatagagcagatgacacatccgtttggacttgccatctttggagagcatttattttttactgactggagactgggtgccattattcgagtcaggaaagcagatggtggagaaatgacagttatccgaagtggcattgcttacatactgcatttgaaatcgtatgatgtcaacatccagactggttctaacgcctgtaatcaacccacgcatcctaacggtgactgcagccacttctgcttcccggtgccaaatttccagcgagtgtgtgggtgcccttatggaatgaggctggcttccaatcacttgacatgcgagggggacccaacaaatgaaccacccacggagcagtgtggcttattttccttcccctgtaaaaatggcagatgtgtgcccaattactatctctgtgatggagtcgatgattgtcatgataacagtgatgagcaactatgtggcacacttaataatacctgttcatcttcggcgttcacctgtggccatggggagtgcattcctgcacactggcgctgtgacaaacgcaacgactgtgtggatggcagtgatgagcacaactgccccacccacgcacctgcttcctgccttgacacccaatacacctgtgataatcaccagtgtatctcaaagaactgggtctgtgacacagacaatgattgtggggatggatctgatgaaaagaactgcaattcgacagagacatgccaacctagtcagtttaattgccccaatcatcgatgtattgacctatcgtttgtctgtgatggtgacaaggattgtgttgatggatctgatgaggttggttgtgtattaaactgtactgcttctcaattcaagtgtgccagtggggataaatgtattggcgtcacaaatcgttgtgatggtgtttttgattgcagtgacaactcggatgaagcgggctgtccaaccaggcctcctggtatgtgccactcagatgaatttcagtgccaagaagatggtatctgcatcccgaacttctgggaatgtgatgggcatccagactgcctctatggatctgatgagcacaatgcctgtgtccccaagacttgccchtcatcatatttccactgtgacaacggaaactgcatccacaggscatggctctgtgatcgggacaatgactgcggggatatgagtgatgagaaggactgccctactcagccctttcgctgtcctagttggcaatggcagtgtcttggccataacatctgtgtgaatctgagtgtagtgtgtgatggcatctttgactgccccaatgggacagatgagtccccactttgcaatgggaacagctgctcagatttcaatggtggttgtactcacgagtgtgttcaagagccctttggggctaaatgcctatgtccattgggattcttacttgccaatgattctaagacctgtgaagacatagatgaatgtgatattctaggctcttgtagccagcactgttacaatatgagaggttctttccggtgctcgtgtgatacaggctacatgttagaaagtgatgggaggacttgcaaagttacagcatctgagagtctgctgttacttgtggcaagtcagaacaaaattattgccgacagtgtcacctcccaggtccacaatatctattcattggtcgagaatggttcttacattgtagctgttgattttgattcaattagtggtcgtatcttttggtctgatgcaactcagggtaaaacctggagtgcgtttcaaaatggaacggacagaagagtggtatttgacagtagcatcatcttgactgaaactattgcaatagattgggtaggtcgtaatctttactggacagactatgctctggaaacaattgaagtctccaaaattgatgggagccacaggactgtgctgattagtaaaaacctaacaaatccaagaggactagcattagatcccagaatgaatgagcatctactgttctggtctgactggggccaccaccctcgcatcgagcgagccagcatggacggcagcatgcgcactgtcattgtccaggacaagatcttctggccctgcggcttaactattgactaccccaacagactgctctacttcatggactcctatcttgattacatggacttttgcgattataatggacaccatcggagacaggtgatagccagtgatttgattatacggcacccctatgccctaactctctttgaagactctgtgtactggactgaccgtgctactcgtcgggttatgcgagccaacaagtggcatggagggaaccagtcagttgtaatgtataatattcaatggccccttgggattgttgcggttcatccttcgaaacaaccaaattctgtgaatccatgtgccttttcccgctgcagccatctctgcctgctttcctcacaggggcctcatttttactcctgtgtttgtccttcaggatggagtctgtctcctgatctcctgaattgcttgagagatgatcaacctttcttaataactgtaaggcaacatataatttttggaatctcccttaatcctgaggtgaagagcaatgatgctatggtccccatagcagggatacagaatggtttagatgttgaatttgatgatgctgagcaatacatctattgggttgaaaatccaggtgaaattcacagagtgaagacagatggcaccaacaggacagtatttgcttctatatctatggtggggccttctatgaacctggccttagattggatttcaagaaacctttattctaccaatcctagaactcagtcaatcgaggttttgacactccacggagatatcagatacagaaaaacattgattgccaatgatgggacagctcttggagttggctttccaattggcataactgttgatcctgctcgtgggaagctgtactggtcagaccaaggaactgacagtggggttcctgccaagatcgccagtgctaacatggatggcacatctgtgaaaactctctttactgggaacctcgaacacctggagtgtgtcactcttgacatcgaagagcagaaactctactgggcagtcactggaagaggagtgattgaaagaggaaacgtggatggaacagatcggatgatcctggtacaccagctttcccacccctggggaattgcagtccatgattctttcctttattatactgatgaacagtatgaggtcattgaaagagttgataaggccactggggccaacaaaatagtcttgagagataatgttccaaatctgaggggtcttcaagtttatcacagacgcaatgccgccgaatcctcaaatggctgtagcaacaacatgaatgcctgtcagcagatttgcctgcctgtaccaggaggattgttttcctgcgcctgtgccactggatttaaactcaatcctgataatcggtcctgctctccatataactctttcattgttgtttcaatgctgtctgcaatcagaggctttagcttggaattgtcagatcattcagaaaccatggtgccggtggcaggccaaggacgaaacgcactgcatgtggatgtggatgtgtcctctggctttatttattggtgtgattttagcagctcagtggcatctgataatgcgatccgtagaattaaaccagatggatcttctctgatgaacattgtgacacatggaataggagaaaatggagtccggggtattgcagtggattgggtagcaggaaatctttatttcaccaatgcctttgtttctgaaacactgatagaagttctgcggatcaatactacttaccgccgtgttcttcttaaagtcacagtggacatgcctaggcatattgttgtagatcccaagaacagatacctcttctgggctgactatgggcagagaccaaagattgagcgttctttccttgactgtaccaatcgaacagtgcttgtgtcagagggcattgtcacaccacggggcttggcagtggaccgaagtgatggctacgtttattgggttgatgattctttagatataattgcaaggattcgtatcaatggagagaactctgaagtgattcgttatggcagtcgttacccaactccttatggcatcactgtttttgaaaattctatcatatgggtagataggaatttgaaaaagatcttccaagccagcaaggaaccagagaacacagagccacccacagtgataagagacaatatcaactggctaagagatgtgaccatctttgacaagcaagtccagccccggtcaccagcagaggtcaacaacaacccttgcttggaaaacaatggtgggtgctctcatctctgctttgctctgcctggattgcacaccccaaaatgtgactgtgcctttgggaccctgcaaagtgatggcaagaattgtgccatttcaacagaaaatttcctcatctttgccttgtctaattccttgagaagcttacacttggaccctgaaaaccatagcccacctttccaaacaataaatgtggaaagaactgtcatgtctctagactatgacagtgtaagtgatagaatctacttcacacaaaatttagcctctggagttggacagatttcctatgccaccctgtcttcagggatccatactccaactgtcattgcttcaggtatagggactgctgatggcattgcctttgactggattactagaagaatttattacagtgactacctcaaccagatgattaattccatggctgaagatgggtctaaccgcactgtgatagcccgcgttccaaaaccaagagcaattgtgttagatccctgccaagggtacctgtactgggctgactgggatacacatgccaaaatcgagagagccacattgggaggaaacttccgcgtacccattgtgaacagcagtctggtcatgcccagtgggctgactctggactatgaagaggaccttctctactgggtggatgctagtctgcagaggattgaacgcagcactctgacgggcgtggatcgtgaagtcattgtcaatgcagccgttcatgcttttggcttgactctctatggccagtatatttactggactgacttgtacacacaaagaatttaccgagctaacaaatatgacgggtcaggtcagattgcaatgaccacaaatttgctctcccagcccaggggaatcaacactgttgtgaagaaccagaaacaacagtgtaacaatccttgtgaacagtttaatgggggctgcagccatatctgtgcaccaggtccaaatggtgccgagtgccagtgtccacatgagggcaactggtatttggccaacaacaggaagcactgcattgtggacaatggtgaacgatgtggtgcatcttccttcacctgctccaatgggcgctgcatctcggaagagtggaagtgtgataatgacaacgactgtggggatggcagtgatgagatggaaagtgtctgtgcacttcacacctgctcaccgacagccttcacctgtgccaatgggcgatgtgtccaatactcttaccgctgtgattactacaatgactgtggtgatggcagtgatgaggcagggtgcctgttcagggactgcaatgccaccacggagtttatgtgcaataacagaaggtgcatacctcgtgagtttatctgcaatggtgtagacaactgccatgataataacacttcagatgagaaaaattgccctgatcgcacttgccagtctggatacacaaaatgtcataattcaaatatttgtattcctcgcgtttatttgtgtgacggagacaatgactgtggagataacagtgatgaaaaccctacttattgcaccactcacacgtgcagcagcagtgagttccaatgcacatctgggcgctgtattcctcaacattggtattgtgatcaagaaacagattgttttgatgcctctgatgaacctgcctcttgtggtcactctgagcgaacatgcctagctgatgagttcaagtgtgatggtgggaggtgcatcccaagcgaatggatctgtgacggtgataatgactgtggggatatgagtgacgaggataaaaggcaccagtgtcagaatcaaaactgctcggattccgagtttctctgtgtaaatgacagacctccggacaggaggtgcattccccagtcttgggtctgtgatggcgatgtggattgtactgacggctacgatgagaatcagaattgcaccaggagaacttgctctgaaaatgaattcacctgtggttacggactgtgtatcccaaagatattcaggtgtgaccggcacaatgactgtggtgactatagcgacgagaggggctgcttataccagacttgccaacagaatcagtttacctgtcagaacgggcgctgcattagtaaaaccttcgtctgtgatgaggataatgactgtggagacggatctgatgagctgatgcacctgtgccacaccccagaacccacgtgtccacctcacgagttcaagtgtgacaatgggcgctgcatcgagatgatgaaactctgcaaccacctagatgactgtttggacaacagcgatgagaaaggctgtggcattaatgaatgccatgacccttcaatcagtggctgcgatcacaactgcacagacaccttaaccagtttctattgttcctgtcgtcctggttacaagctcatgtctgacaagcggacttgtgttgatattgatgaatgcacagagatgccttttgtctgtagccagaagtgtgagaatgtaataggctcctacatctgtaagtgtgccccaggctacctccgagaaccagatggaaagacctgccggcaaaacagtaacatcgaaccctatctcatttttagcaaccgttactatttgagaaatttaactatagatggctatttttactccctcatcttggaaggactggacaatgttgtggcattagattttgaccgagtagagaagagattgtattggattgatacacagaggcaagtcattgagagaatgtttctgaataagacaaacaaggagacaatcataaaccacagactaccagctgcagaaagtctggctgtagactgggtttccagaaagctctactggttggatgcccgcctggatggcctctttgtctctgacctcaatggtggacaccgccgcatgctggcccagcactgtgtggatgccaacaacaccttctgctttgataatcccagaggacttgcccttcaccctcaatatgggtacctctactgggcagactggggtcaccgcgcatacattgggagagtaggcatggatggaaccaacaagtctgtgataatctccaccaagttagagtggcctaatggcatcaccattgattacaccaatgatctactctactgggcagatgcccacctgggttacatagagtactctgatttggagggccaccatcgacacacggtgtatgatggggcactgcctcaccctttcgctattaccatttttgaagacactatttattggacagattggaatacaaggacagtggaaaagggaaacaaatatgatggatcaaatagacagacactggtgaacacaacacacagaccatttgacatccatgtgtaccatccatataggcagcccattgtgagcaatccctgtggtaccaacaatggtggctgttctcatctctgcctcatcaagccaggaggaaaagggttcacttgcgagtgtccagatgacttccgcacccttcagctgagtggcagcacctactgcatgcccatgtgctccagcacccagttcctgtgcgctaacaatgaaaagtgcattcctatctggtggaaatgtgatggacagaaagactgctcagatggctctgatgaactggccctttgcccgcagcgcttctgccgactgggacagttccagtgcagtgacggcaactgcaccagcccgcagactttatgcaatgctcaccaaaattgccctgatgggtctgatgaagaccgtcttctttgtgagaatcaccactgtgactccaatgaatggcagtgcgccaacaaacgttgcatcccagaatcctggcagtgtgacacatttaacgactgtgaggataactcagatgaagacagttcccactgtgccagcaggacctgccggccgggccagtttcggtgtgctaatggccgctgcatcccgcaggcctggaagtgtgatgtggataatgattgtggagaccactcggatgagcccattgaagaatgcatgagctctgcccatctctgtgacaacttcacagaattcagctgcaaaacaaattaccgctgcatcccaaagtgggccgtgtgcaatggtgtagatgactgcagggacaacagtgatgagcaaggctgtgaggagaggacatgccatcctgtgggggatttccgctgtaaaaatcaccactgcatccctcttcgttggcagtgtgatgggcaaaatgactgtggagataactcagatgaggaaaactgtgctccccgggagtgcacagagagcgagtttcgatgtgtcaatcagcagtgcattccctcgcgatggatctgtgaccattacaacgactgtggggacaactcagatgaacgggactgtgagatgaggacctgccatcctgaatattttcagtgtacaagtggacattgtgtacacagtgaactgaaatgcgatggatccgctgactgtttggatgcgtctgatgaagctgattgtcccacacgctttcctgatggtgcatactgccaggctactatgttcgaatgcaaaaaccatgtttgtatcccgccatattggaaatgtgatggcgatgatgactgtggcgatggttcagatgaagaacttcacctgtgcttggatgttccctgtaattcaccaaaccgtttccggtgtgacaacaatcgctgcatttatagtcatgaggtgtgcaatggtgtggatgactgtggagatggaactgatgagacagaggagcactgtagaaaaccgacccctaaaccttgtacagaatatgaatataagtgtggcaatgggcattgcattccacatgacaatgtgtgtgatgatgccgatgactgtggtgactggtccgatgaactgggttgcaataaaggaaaagaaagaacatgtgctgaaaatatatgcgagcaaaattgtacccaattaaatgaaggaggatttatctgctcctgtacagctgggttcgaaaccaatgtttttgacagaacctcctgtctagatatcaatgaatgtgaacaatttgggacttgtccccagcactgcagaaataccaaaggaagttatgagtgtgtctgtgctgatggcttcacgtctatgagtgaccgccctggaaaacgatgtgcagctgagggtagctctcctttgttgctactgcctgacaatgtccgaattcgaaaatataatctctcatctgagaggttctcagagtatcttcaagatgaggaatatatccaagctgttgattatgattgggatcccraggacataggcctcagtgttgtgtattacactgtgcgaggggagggctctaggtttggtgctatcaaacgtgcctacatccccaactttgaatccggccgcaataatcttgtgcaggaagttgacctgaaactgaaatacgtaatgcagccagatggaatagcagtggactgggttggaaggcatatttactggtcagatgtcaagaataaacgcattgaggtggctaaacttgatggaaggtacagaaagtggctgatttccactgacctggaccaaccagctgctattgctgtgaatcccaaactagggcttatgttctggactgactggggaaaggaacctaaamtcgagtctgcctggatgaatggagaggaccgcaacatcctggttttcgaggaccttggttggccaactggcctttctatcgattatttgaacaatgaccgaatctactggagtgacttcaaggaggacgttattgaaaccataaaatatgatgggactgataggagagtcattgcaaaggaagcaatgaacccttacagcctggacatctttgaagaccagttatactggatatctaaggaaaagggagaagtatggaaacaaaataaatttgggcaaggaaagaaagagaaaacgctggtagtgaacccttggctcactcaagttcgaatctttcatcaactcagatacaataagtcagtgcccaacctttgcaaacagatctgcagccacctctgccttctgagacctggaggatacagctgtgcctgtccccaaggctccagctttatagaggggagcaccactgagtgtgatgcagccatygaactgcctatcaacctgccccccccatgcaggtgcatgcacggaggaaattgctattttgatgagactgacctccccaaatgcaagtgtcctagcggctacaccggaaaatattgtgaaatggcgttttcaaaaggcatctctccaggaacaaccgcagtagctgtgctgttgacaatcctcttgatcgtcgtaattggagctctggcaattgcaggattcttccactatagaaggaccggctcccttttgcctgctctgcccaagctgccaagcttaagcagtctcgtcaagccctctgaaaatgggaatggggtgaccttcagatcaggggcagatcttaacatggatattggagtgtctggttttggacctgagactgctattgacaggtcaatggcaatgagtgaagactttgtcatggaaatggggaagcagcccataatatttgaaaacccaatgtactcagccagagacagtgctgtcaaagtggttcagccaatccaggtgactgtatctgaaaatgtggataataagaattatggaagtcccataaacccttctgagatagttccagagacaaacccaacttcaccagctgctgatggaactcaggtgacaaaatggaatctcttcaaacgaaaatctaaacaaactaccaactttgaaaatccaatctatgcacagatggagaacgagcaaaaggaaagtgttgctgcgacaccacctccatcaccttcgctccctgctaagcctaagcctccttcgagaagagacccaactccaacctattctgcaacagaagacacttttaaagacaccgcaaatcttgttaaagaagactctgaagtatagctatacc

SEQ ID NO: 126 - RNA, 5253 nt, Homo sapiens
  source 1..5253: mol_type = other RNA
ttcacctgctccaatgggcgctgcatctcggaagagtggaagtgtgataatgacaacggctgtggggatggcagtgatgagatggaaagtgtctgtgcacttcacacctgctcaccgacagccttcacctgtgccaatgggcgatgtgtccaatactcttaccgctgtgattactacaatgactgtggtgatggcagtgatgagacagggtgcctgttcagggactgcaatgccaccacggagtttatgtgcaataacagaaggtgcatacctcgtgagtttatctgcaatggtgtagacaactgccatgataataacacttcagatgagaaaaattgccctgatcgcacttgccagtctggataccccaaatgtcataattcaaatatttgtattcctcgcgtttatttgtgtgacggagacaatgactgtggagataacagtgatgaaaaccctacttattgcaccactcacacgtgcagcagcagtgagttccaatgcgcatctgggcgctgtattccccaaacatttggtatttgtgatcaagaaacagattgttttgatgcctctgatgaaccctcctcttgtggtcactctgagcgaacatgcctatctgatgagttcaagtgtgatggtgggaggtgcatcccaaacgaatggatctgtgacggtgataatgactgtggggatatgagtgacgaggataaaaggcaccagtgtcagaatcaaaactgctcggattccgagtttccctgtgtaaatgacagacctccggacaggaggtgcattccccagtcttggccccctgatggcgatgtggattgtactgacggccacgatgagattcagaattgcaccaggagaacttgctctgaaaatgaattcacctgtggttacggactgtgtatcccaaagatattcaggtgtgaccggcacaatgactgtggtgactatagcgacgagaggggctgcttataccagacttgccaacagaatcagtttacctgtcagaacgggcgctgcattagtaaaaccttcgtctgtgatgaggataatgactgtggagacggatctgatgagctgatgcacctgtgccacaccccagaacccacgtgtccacctcacgagttcaagtgtgacaatgggcgctgcatcgagatgatgaaactctgcaaccacctagatgactgtttggacaacagcgatgagaaaggctgtggcattaatgaatgccatgacccttcaatcagtggctgcgatcacaactgcacagacaccttaaccagtttctattgttcctgtcgtcctggttacaagctcatgtctgacaagcggacttgtgttgatattgatgaatgcacagagatgccttttgtctgtagccagaagtgtgagaatgtaataggctcctacatctgtaagtgtgccccaggctacctccgagaaccagatggaaagacctgccggcaaaacagtaacatcgaaccctatctcatttttagcaaccgttactatttgcgaaatttaactatagatggctatttttactccctcatcttggaaggactggacaatgttgtggcattagattttgaccgagtagagaagagattgtattggattgatacacagaggcaagtcattgagagaatgtttctgaataagacaaacaaggagacaatcataaaccacagactaccagctgcagaaagtctggctgtagactgggtttccagaaagctctactggttggatgcccgcctggatggcctctttgtctctgacctcaatggtggacaccgccgcatgctggcccagcactgtgtggatgccaacaacaccttctgctttgataatcccagaggacttgcccttcaccctcaatatgggtacctctactgggcagactggggtcaccgcgcatacattgggagagtaggcatggatggaaccaacaagtctgtgataatctccaccaagttagagtggcctaatggcatcaccattgattacaccaatgatctactctactgggcagatgcccacctgggttacatagagtactctgatttggagggccaccatcgacacacggtgtatgatggggcactgcctcaccctttcgctattaccatttttgaagacactatttattggacagattggaatacaaggacagtggaaaagggaaacaaatatgatggatcaaatagacagacactggtgaacacaacccacagaccatttgacatccatgtgtaccatccatataggcagcccattgtgagcaatccctgtggtaccaacaatggtggctgttctcatctctgcctcatcaagccaggaggaaaagggttcacttgcgagtgtccagatgacttccgcacccttcaactgagtggcagcacctactgcatgcccatgtgctccagcacccagttcctgtgcgctaacaatgaaaagtgcattcctatctggtggaaatgtgatggacagaaagactgctcagatggctctgatgaactggccctttgcccgcagcgcttctgccgactgggacagttccagtgcagtgacggcaactgcaccagcccgcagactttatgcaatgctcaccaaaattgccctgatgggtctgatgaagaccgtcttctttgtgagaatcaccactgtgactccaatgaatggcagtgcgccaacaaacgttgcatcccagaatcctggcagtgtgacagttttaacgactgtgaggataactcagatgaagacagttcccactgtgccagcaggacctgccggccgggccagtttcggtgtgctaatggccgctgcatcccgcaggcctggaagtgtgatgtggataatgattgtggagaccactcggatgagcccattgaagaatgcatgagctctgcccatctctgtgacaacttcacagaattcagctgcaaaacaaattaccgctgcatcccaaagtgggccgtgtgcaatggtgtagatgactgcagggacaacagtgatgagcaaggctgtgaggagaggacatgccatcctgtgggggatttccgctgtaaaaatcaccactgcatccctcttcgttggaagtgtgatgggcaaaatgactgtggagataactcagatgaggaaaactgcgctccccgggagtgcacagagagcgagtttcgatgtgtcaatcagcagtgcattccctcgcgatggatctgtgaccattacaacgacttgtggggggacaactcagatgaacgggactgtgagatgaggacctgccatcctgaatattttcagtgtacaagtggacatcgtgtacacagtgaactgaaatgcgatggatccgctgactgtttggatgcgtctgatgaagctgattgtcccacacgctttcctgatggtgcatactgccaggctactatgttcgaatgcaaaaaccatgtttgtatcccgccatattggaaatgtgatggcgatgatgactgtggcgatggttcagatgaagaacttcacctgtgcttggatgttccctgtaattcaccaaaccgtttccggtgtgacaacaatcgctgcatttatagtcatgaggtgtgcaatggtgtggatgactgtggagatggaactgatgagacagaggagcactgtagaaaaccgacccctaaaccttgtacagaatatgaatataagtgtggcaatgggcattgcattccacatgacaatgtgtgtgatgatgccgatgactgtggtgactggtccgatgaactgggttgcaataaaggaaaagaaagaacatgtgctgaaaatatatgcgagcaaaattgtacccaattaaatgaaggaggatttatctgctcctgtacagctgggttcgaaaccaatgtttttgacagaacctcctgtctagatatcaatgaatgtgaacaatttgggacttgtccccagcactgcagaaataccaaaggaagttatgagtgtgtctgtgctgatggcttcacgtctatgagtgaccgccctggaaaacgatgtgcagctgagggtagctctcctttgttgctactgcctgacaatgtccgaattcgaaaatataatctctcatctgagaggttctcagagtatcttcaagatgaggaatatatccaagctgttgattatgattgggatcccgaggacataggcctcagtgttgtgtattacactgtgcgaggggagggctctaggtttggtgctatcaaacgtgcctacatccccaactttgaatccggccgcaataatcttgtgcaggaagttgacctgaaactgaaatacgtaatgcagccagatggaatagcagtggactgggttggaaggcatatttactggtcagatgtcaagaataaacgcattgaggtggctaaacttgatggaaggtacagaaagtggctgatttccactgacctggaccaaccagctgctattgctgtgaatcccaaactagggcttatgttctggactgactggggaaaggaacctaaactcgagtctgcctggatgaatggagaggaccccaacatcctggttttcgaggaccttggttggccaactggcctttctatcgattatttgaacaatgaccgaatctactggagtgacttcaaggaggacgttattgaaaccataaaatatgatgggactgataggagagtcattgcaaaggaagcaatgaacccttacagcctggacatctttgaagaccagttatactggatatctaaggaaaagggagaagtatggaaacaaaataaatttgggcaaggaaagaaagagaaaacgctggtagtgaacccttggctcactcaagttcgaatctttcatcaactcagatacaataagtcagtgcccaacctttgcaaacagatctgcagccacctctgccttctgagacctggaggatacagctgtgcctgtccccaaggctccagctttatagaggggagcaccactgagtgtgatgcagccatcgaactgcctatcaacctgccccccccatgcaggtgcatgcacggaggaaattgctattttgatgagactgacctccccaaatgcaagtgtcctagcggctacaccggaaaatattgtgaaatggcgttttcaaaaggcatctctccaggaacaaccgcagtagctgtgctgttgacaatcctcttgatcgtcgtaattggagctctggcaattgcaggattcttccactatagaaggaccggctcc

SEQ ID NO: 127 - RNA, 804 nt, Homo sapiens
  source 1..804: mol_type = other RNA
aaatacgtaatgcagccagatggaatagcagtggactgggttggaaggcatatttactggtcagatgtcaagaataaacgcattgaggtggctaaacttgatggaaggtacagaaagtggctgatttccactgacctggaccaaccagctgctattgctgtgaatcccaaactagggcttatgttctggactgactggggaaaggaacctaaaatcgagtctgcctggatgaatggagaggaccgcaacatcctggttttcgaggaccttggttggccaactggcctttctatcgattatttgaacaatgaccgaatctactggagtgacttcaaggaggacgttattgaaaccataaaatatgatgggactgataggagagtcattgcaaaggaagcaatgaacccttacagcctggacatctttgaagaccagttatactggatatctaaggaaaagggagaagtatggaaacaaaataaatttgggcaaggaaagaaagagaaaacgctggtagtgaacccttggctcactcaagttcgaatctttcatcaactcagatacaataagtcagtgcccaacctttgcaaacagatctgcagccacctctgccttctgagacctggaggatacagctgtgcctgtccccaaggctccagctttatagaggggagcaccactgagtgtgatgcagccatcgaactgcctatcaacctgccccccccatgcaggtgcatgcacggaggaaattgctattttgatgagactgacctccccaaatgcaagtgtcctagcggctacacc

SEQ ID NO: 128 - RNA, 2915 nt, Homo sapiens
  source 1..2915: mol_type = other RNA
attttgcctgaagaaaggtgacttctaacaactgtctgtgattctcagaaagctctactggttggatgcccgcctggatggcctctttgtctctgacctcaatggtggacaccgccgcatgctggcccagcactgtgtggatgccaacaacaccttctgctttgataatcccagaggacttgcccttcaccctcaatatgggtacctctactgggcagactggggtcaccgcgcatacattgggagagtaggcatggatggaaccaacaagtctgtgataatctccaccaagttagagtggcctaatggcatcaccattgattacaccaatgatctactctactgggcagatgcccacctgggttacatagagtactctgatttggagggccaccatcgacacacggtgtatgatggggcactgcctcaccctttcgctattaccatttttgaagacactatttattggacagattggaatacaaggacagtggaaaagggaaacaaatatgatggatcaaatagacagacactggtgaacacaacacacagaccatttgacatccatgtgtaccatccatataggcagcccattgtgagcaatccctgtggtaccaacaatggtggctgttctcatctctgcctcatcaagccaggaggaaaagggttcacttgcgagtgtccagatgacttccgcacccttcaactgagtggcagcacctactgcatgcccatgtgctccagcacccagttcctgtgcgctaacaatgaaaagtgcattcctatctggtggaaatgtgatggacagaaagactgctcagatggctctgatgaactggccctttgcccgcagcgcttctgccgactgggacagttccagtgcagtgacggcaactgcaccagcccgcagactttatgcaatgctcaccaaaattgccctgatgggtctgatgaagaccgtcttctttgtgagaatcaccactgtgactccaatgaatggcagtgcgccaacaaacgttgcatcccagaatcctggcagtgtgacacatttaacgactgtgaggataactcagatgaagacagttcccactgtgccagcaggacctgccggccgggccagtttcggtgtgctaatggccgctgcatcccgcaggcctggaagtgtgatgtggataatgattgtggagaccactcggatgagcccattgaagaatgcatgagctctgcccatctctgtgacaacttcacagaattcagctgcaaaacaaattaccgctgcatcccaaagtgggccgtgtgcaatggtgtagatgactgcagggacaacagtgatgagcaaggctgtgaggagaggacatgccatcctgtgggggatttccgctgtaaaaatcaccactgcatccctcttcgttggcagtgtgatgggcaaaatgactgtggagataactcagatgaggaaaactgtgctccccgggagtgcacagagagcgagtttcgatgtgtcaatcagcagtgcattccctcgcgatggatctgtgaccattacaacgactgtggggacaactcagatgaacgggactgtgagatgcgtctgatgaagctgattgtcccacacgctttcctgatggtgcatactgccaggctactatgttcgaatgcaaaaaccatgtttgtatcccgccatattggaaatgtgatggcgatgatgactgtggcgatggttcagatgaagaacttcacctgtgcttggatgttccctgtaattcaccaaaccgtttccggtgtgacaacaatcgctgcatttatagtcatgaggtgtgcaatggtgtggatgactgtggagatggaactgatgagacagaggagcactgtagaaaaccgacccctaaaccttgtacagaatatgaatataagtgtggcaatgggcattgcattccacatgacaatgtgtgtgatgatgccgatgactgtggtgactggtccgatgaactgggttgcaataaaggaaaagaaagaacatgtgctgaaaatatatgcgagcaaaattgtacccaattaaatgaaggaggatttatctgctcctgtacagctgggttcgaaaccaatgtttttgacagaacctcctgtctagatatcaatgaatgtgaacaatttgggacttgtccccagcactgcagaaataccaaaggaagttatgagtgtgtctgtgctgatggcttcacgtctatgagtgaccgccctggaaaacgatgtgcagctgagggtagctctcctttgttgctactgcctgacaatgtccgaattcgaaaatataatctctcatctgagaggttctcagagtatcttcaagatgaggaatatatccaagctgttgattatgattgggatcccgaggacataggcctcagtgttgtgtattacactgtgcgaggggagggctctaggtttggtgctatcaaacgtgcctacatccccaactttgaatccggccgcaataatcttgtgcaggaagttgacctgaaactgaaatacgtaatgcagccagatggaatagcagtggactgggttggaaggcatatttactggtcagatgtcaagaataaacgcattgaggtggctaaacttgatggaaggtacagaaagtggctgatttccactgacctggaccaaccagctgctattgctgtgaatcccaaactagggcttatgttctggactgactggggaaaggaacctaaactcgagtctgcctggatgaatggagaggaccgcaacatcctggttttcgaggaccttggttggccaactggcctttctatcgattatttgaacaatgaccgaatctactggagtgacttcaaggaggacgttattgaaaccataaaatatgatgggactgataggagagtcattgc

SEQ ID NO: 129 - RNA, 15808 nt, Homo sapiens
  source 1..15808: mol_type = other RNA
aaagtgcagggggcgggccgggcggcagggggcctgcccgctggattcccgcatgcttgttccggggcggtcgggtctaaagggctttatgcactgtctggagggtggggactggcgcgggtagaaaacgggatgcctcgggcgtgggggcaggcttttggccactaggagctggcggaggtgcagacctaaaggagcgttcgctagcagaggcgctgccggtgcggtgtgctacgcgcgcccacctcccggggaaggaacggcgaggccggggaccgtcgcggagatggatcgcgggccggcagcagtggcgtgcacgctgctcctggctctcgtcgcctgcctagcgccggccagtggccaagaatgtgacagtgcgcattttcgctgtggaagtgggcattgcatccctgcagactggaggtgtgatgggaccaaagactgttcagatgacgcggatgaaattggctgcgctgttgtgacctgccagcagggctatttcaagtgccagagtgagggacaatgcatccccaactcctgggtgtgtgaccaagatcaagactgtgatgatggctcagatgaacgtcaagattgctcacaaagtacatgctcaagtcatcagataacatgctccaatggtcagtgtatcccaagtgaatacaggtgcgaccacgtcagagactgccccgatggagctgatgagaatgactgccagtacccaacatgtgagcagcttacttgtgacaatggggcctgctataacaccagtcagaagtgtgattggaaagttgattgcagggactcctcagatgaaatcaactgcactgagatatgcttgcacaatgagttttcatgtggcaatggagagtgtatccctcgtgcttatgtctgtgaccatgacaatgattgccaagacggcagtgacgaacatgcttgcaactatccgacctgcggtggttaccagttcacttgccccagtggccgatgcatttatcaaaactgggtttgtgatggagaagatgactgtaaagataatggagatgaagatggatgtgaaagcggtcctcatgatgttcataaatgttccccaagagaatggtcttgcccagagtcgggacgatgcatctccatttataaagtttgtgatgggattttagattgcccaggaagagaagatgaaaacaacactagtaccggaaaatactgtagtatgactctgtgctctgccttgaactgccagtaccagtgccatgagacgccgtatggaggagcgtgtttttgtcccccaggttatatcatcaaccacaatgacagccgtacctgtgttgagtttgatgattgccagatatggggaatttgtgaccagaagtgtgaaagccgacctggccgtcacctgtgccactgtgaagaagggtatatcttggagcgtggacagtattgcaaagctaatgattcctttggcgaggcctccattatcttctccaatggtcgggatttgttaattggtgatattcatggaaggagcttccggatcctagtggagtctcagaatcgtggagtggccgtgggtgtggctttccactatcacctgcaaagagttttttggacagacaccgtgcaaaataaggttttttcagttgacattaatggtttaaatatccaagaggttctcaatgtttctgttgaaaccccagagaacctggctgtggactgggttaataataaaatctatctagtggaaaccaaggtcaaccgcatagatatggtaaatttggatggaagctatcgggttacccttataactgaaaacttggggcatcctagaggaattgccgtggacccaactgttggttatttatttttctcagattgggagagcctttctggggaacctaagctggaaagggcattcatggatggcagcaaccgtaaagacttggtgaaaacaaagctgggatggcctgctggggtaactctggatatgatatcgaagcgtgtttactgggttgactctcggtttgattacattgaaactgtaacttatgatggaattcaaaggaagactgtagttcatggaggctccctcattcctcatccctttggagtaagcttatttgaaggtcaggtgttctttacagattggacaaagatggccgtgctgaaggcaaacaagttcacagagaccaacccacaagtgtactaccaggcttccctgaggccctatggagtgactgtttaccattccctcagacagccctatgctaccaatccgtgtaaagataacaatgggggctgtgagcaggtctgtgtcctcagccacagaacagataatgatggtttgggtttccgttgcaagtgcacattcggcttccaactggatacagatgagcgccactgcattgctgttcagaatttcctcattttttcatcccaagttgctattcgtgggatcccgttcaccttgtctacccaggaagatgtcatggttccagtttcggggaatccttctttctttgtcgggattgattttgacgcccaggacagcactatctttttttcagatatgtcaaaacacatgatttttaagcaaaagattgatggcacaggaagagaaattctcgcagctaacagggtggaaaatgttgaaagtttggcttttgattggatttcaaagaatctctattggacagactctcattacaagagtatcagtgtcatgaggctagctgataaaacgagacgcacagtagttcagtatttaaataacccacggtcggtggtagttcatccttttgccgggtatctattcttcactgattggttccgtcctgctaaaattatgagagcatggagtgacggatctcacctcttgcctgtaataaacactactcttggatggcccaatggcttggccatcgattgggctgcttcacgattgtactgggtagatgcctattttgataaaattgagcacagcacctttgatggtttagacagaagaagactgggccatatagagcagatgacacatccgtttggacttgccatctttggagagcatttattttttactgactggagactgggtgccattattcgagtcaggaaagcagatggtggagaaatgacagttatccgaagtggcattgcttacatactgcatttgaaatcgtatgatgtcaacatccagactggttctaacgcctgtaatcaacccacgcatcctaacggtgactgcagccacttctgcttcccggtgccaaatttccagcgagtgtgtgggtgcccttatggaatgaggctggcttccaatcacttgacatgcgagggggacccaaccaatgaaccacccacagagcagtgtggcttattttccttcccctgtaaaaatggcagatgtgtgcccaattactatctctgtgatggagtcgatgattgtcatgataacagtgatgagcaactatgtggcacacttaataatacctgttcatcttcggcgttcacctgtggccatggggagtgcattcctgcacactggcgctgtgacaaacgcaacgactgtgtggatggcagtgatgagcacaactgccccacccacgcacctgcttcctgccttgacacccaatacacctgtgataatcaccagtgtatctcaaagaactgggtctgtgacacagacaatgattgtggggatggatctgatgaaaagaactgcaattcgacagagacatgccaacctagtcagtttaattgccccaatcatcgatgtattgacctatcgtttgtctgtgatggtgacaaggattgtgttgatggatctgatgaggttggttgtgtattaaactgtactgcttctcaattcaagtgtgccagtggggataaatgtattggcgtcacaaatcgttgtgatggtgtttttgattgcagtgacaactcggatgaagcaggctgtccaaccaggcctcctggtatgtgccactcagatgaatttcagtgccaagaagatggtatctgcatcccgaacttctgggaatgtgatgggcatccagactgcctctatggatctgatgagcacaatgcctgtgtccccaagacttgcccttcatcatatttccactgtgacaacggaaactgcatccacagggcatggctctgtgatcgggacaatgactgcggggatatgagtgatgagaaggactgccctactcagccctttcgctgtcctagttggcaatggcagtgtcttggccataacatctgtgtgaatctgagtgtagtgtgtgatggcatctttgactgccccaatgggacagatgagtccccactttgcaatgggaacagctgctcagatttcaatggtggttgtactcacgagtgtgttcaagagccctttggggctaaatgcctatgtccattgggattcttacttgccaatgattctaagacctgtgaagacatagatgaatgtgatattctaggctcttgtagccagcactgttacaatatgagaggttctttccggtgctcgtgtgatacaggctacatgttagaaagtgatgggaggacttgcaaagttacagcatctgagagtctgctgttacttgtggcaagtcagaacaaaattattgccgacagtgtcacctcccaggtccacaatatctattcattggtcgagaatggttcttacattgtagctgttgattttgattcaattagtggtcgtatcttttggtctgatgcaactcagggtaaaacctggagtgcgtttcaaaatggaacggacagaagagtggtatttgacagtagcatcatcttgactgaaactattgcaatagattgggtaggtcgtaatctttactggacagactatgctctggaaacaattgaagtctccaaaattgatgggagccacaggactgtgctgattagtaaaaacctaacaaatccaagaggactagcattagatcccagaatgaatgagcatctactgttctggtctgactggggccaccaccctcgcatcgagcgagccagcatggacggcagcatgcgcactgtcattgtccaggacaagatcttctggccctgcggcttaactattgactaccccaacagactgctctacttcatggactcctatcttgattacatggacttttgtgattataatggacaccatcggagacaggtgatagccagtgatttgattatacggcacccctatgccctaactctctttgaagactctgtgtactggactgaccgtgctactcgtcgggttatgcgagccaacaagtggcatggagggaaccagtcagttgtaatgtataatattcaatggccccttgggattgttgcggttcatccttcgaaacaaccaaattccgtgaatccatgtgccttttcccgctgcagccatctctgcctgctttcctcacaggggcctcatttttactcctgtgtttgtccttcaggatggagtctgtctcctgatctcctgaattgcttgagagatgatcaacctttcttaataactgtaaggcaacatataatttttggaatctcccttaatcctgaggtgaagagcaatgatgctatggtccccatagcagggatacagaatggtttagatgttgaatttgatgatgctgagcaatacatctattgggttgaaaatccaggtgaaattcacagagtgaagacagatggcaccaacaggacagtatttgcttctatatctatggtggggccttctatgaacctggccttagattggatttcaagaaacctttattctaccaatcctagaactcagtcaatcgaggttttgacactccacggagatatcagatacagaaaaacattgattgccaatgatgggacagctcttggagttggctttccaattggcataactgttgatcctgctcgtgggaagctgtactggtcagaccaaggaactgacagtggggttcctgccaagatcgccagtgctaacatggatggcacatctgtgaaaactctctttactgggaacctcgaacacctggagtgtgtcactcttgacatcgaagagcagaaactctactgggcagtcactggaagaggagtgattgaaagaggaaacgtggatggaacagatcgaatgatcctggtacaccagctttcccacccctggggaattgcagtccatgattctttcctttattatactgatgaacagtatgaggtcattgaaagagttgataaggccactggggccaacaaaatagtcttgagagataatgttccaaatctgaggggtcttcaagtttatcacagacgcaatgccgccgaatcctcaaatggctgtagcaacaacatgaatgcctgtcagcagatttgcctgcctgtaccaggaggattgttttcctgcgcctgtgccactggatttaaactcaatcctgataatcggtcctgctctccatataactctttcattgttgtttcaatgctgtctgcaatcagaggctttagcttggaattgtcagatcattcagaaaccatggtgccggtggcaggccaaggacgaaacgcactgcatgtggatgtggatgtgtcctctggctttatttattggtgtgattttagcagctcagtggcatctgataatgcgatccgtagaattaaaccagatggatcttctctgatgaacattgtgacacatggaataggagaaaatggagtccggggtattgcagtggattgggtagcaggaaatctttatttcaccaatgcctttgtttctgaaacactgatagaagttctgcggatcaatactacttaccgccgtgttcttcttaaagtcacagtggacatgcctaggcatattgttgtagatcccaagaacagatacctcttctgggctgactatgggcagagaccaaagattgagcgttctttccttgactgtaccaatcgaacagtgcttgtgtcagagggcattgtcacaccacggggcttggcagtggaccgaagtgatggctacgtttattgggttgatgattctttagatataattgcaaggattcgtatcaatggagagaactctgaagtgattcgttatggcagtcgttacccaactccttatggcatcactgtttttgaaaattctatcatatgggtagataggaatttgaaaaagatcttccaagccagcaaggaaccagagaacacagagccacccacagtgataagagacaatatcaactggctaagagatgtgaccatctttgacaagcaagtccagccccggtcaccagcagaggtcaacaacaacccttgcttggaaaacaatggtgggtgctctcatctctgctttgctctgcctggattgcacaccccaaaatgtgactgtgcctttgggaccctgcaaagtgatggcaagaattgtgccatttcaacagaaaatttcctcatctttgccttgtctaattccttgagaagcttacacttggaccctgaaaaccatagcccacctttccaaacaataaatgtggaaagaactgtcatgtctctagactatgacagtgtaagtgatagaatctacttcacacaaaatttagcctctggagttggacagatttcctatgccaccctgtcttcagggatccatactccaactgtcattgcttcaggtatagggactgctgatggcattgcctttgactggattactagaagaatttattacagtgactacctcaaccagatgattaattccatggctgaagatgggtctaaccgcactgtgatagcccgcgttccaaaaccaagagcaattgtgttagatccctgccaagggtacctgtactgggctgactgggatacacatgccaaaatcgagagagccacattgggaggaaacttccgcgtacccattgtgaacagcagtctggtcatgcccagtgggctgactctggactatgaagaggaccttctctactgggtggatgctagtctgcagaggattgaacgcagcactctgacgggcgtggatcgtgaagtcattgtcaatgcagccgttcatgcttttggcttgactctctatggccagtatatttactggactgacttgtacacacaaagaatttaccgagctaacaaatatgacgggtcaggtcagattgcaatgaccacaaatttgctctcccagcccaggggaatcaacactgttgtgaagaaccagaaacaacagtgtaacaatccttgtgaacagtttaatgggggctgcagccatatctgtgcaccaggtccaaatggtgccgagtgccagtgtccacatgagggcaactggtatttggccaacaacaggaagcactgcattgtggacaatggtgaacgatgtggtgcatcttccttcacctgctccaatgggcgctgcatctcggaagagtggaagtgtgataatgacaacgactgtggggatggcagtgatgagatggaaagtgtctgtgcacttcacacctgctcaccgacagccttcacctgtgccaatgggcgatgtgtccaatactcttaccgctgtgattactacaatgactgtggtgatggcagtgatgaggcagggtgcctgttcagggactgcaatgccaccacggagtttatgtgcaataacagaaggtgcatacctcgtgagtttatctgcaatggtgtagacaactgccatgataataacacttcagatgagaaaaattgccctgatcgcacttgccagtctggatacacaaaatgtcataattcaaatatttgtattcctcgcgtttatttgtgtgacggagacaatgactgtggagataacagtgatgaaaaccctacttattgcaccactcacacgtgcagcagcagtgagttccaatgcgcatctgggcgctgtattcctcaacattggtattgtgatcaagaaacagattgttttgatgcctctgatgaacctgcctcttgtggtcactctgagcgaacatgcctagctgatgagttcaagtgtgatggtgggaggtgcatcccaagcgaatggatctgtgacggtgataatgactgtggggatatgagtgacgaggataaaaggcaccagtgtcagaatcaaaactgctcggattccgagtttctctgtgtaaatgacagacctccggacaggaggtgcattccccagtcttgggtctgtgatggcgatgtggattgtactgacggctacgatgagaatcagaattgcaccaggagaacttgctctgaaaatgaattcacctgtggttacggactgtgtatcccaaagatattcaggtgtgaccggcacaatgactgtggtgactatagcgacgagaggggctgcttataccagacttgccaacagaatcagtttacctgtcagaacgggcgctgcattagtaaaaccttcgtctgtgatgaggataatgactgtggagacggatctgatgagctgatgcacctgtgccacaccccagaacccacgtgtccacctcacgagttcaagtgtgacaatgggcgctgcatcgagatgatgaaactctgcaaccacctagatgactgtttggacaacagcgatgagaaaggctgtggcattaatgaatgccatgacccttcaatcagtggctgcgatcacaactgcacagacaccttaaccagtttctattgttcctgtcgtcctggttacaagctcatgtctgacaagcggacttgtgttgatattgatgaatgcacagagatgccttttgtctgtagccagaagtgtgagaatgtaataggctcctacatctgtaagtgtgccccaggctacctccgagaaccagatggaaagacctgccggcaaaacagtaacatcgaaccctatctcatttttagcaaccgttactatttgagaaatttaactatagatggctatttttactccctcatcttggaaggactggacaatgttgtggcattagattttgaccgagtagagaagagattgtattggattgatacacagaggcaagtcattgagagaatgtttctgaataagacaaacaaggagacaatcataaaccacagactaccagctgcagaaagtctggctgtagactgggtttccagaaagctctactggttggatgcccgcctggatggcctctttgtctctgacctcaatggtggacaccgccgcatgctggcccagcactgtgtggatgccaacaacaccttctgctttgataatcccagaggacttgcccttcaccctcaatatgggtacctctactgggcagactggggtcaccgcgcatacattgggagagtaggcatggatggaaccaacaagtctgtgataatctccaccaagttagagtggcctaatggcatcaccattgattacaccaatgatctactctactgggcagatgcccacctgggttacatagagtactctgatttggagggccaccatcgacacacggtgtatgatggggcactgcctcaccctttcgctattaccatttttgaagacactatttattggacagattggaatacaaggacagtggaaaagggaaacaaatatgatggatcaaatagacagacactggtgaacacaacacacagaccatttgacatccatgtgtaccatccatataggcagcccattgtgagcaatccctgtggtaccaacaatggtggctgttctcatctctgcctcatcaagccaggaggaaaagggttcacttgcgagtgtccagatgacttccgcacccttcagctgagtggcagcacctactgcatgcccatgtgctccagcacccagttcctgtgcgctaacaatgaaaagtgcattcctatctggtggaaatgtgatggacagaaagactgctcagatggctctgatgaactggccctttgcccgcagcgcttctgccgactgggacagttccagtgcagtgacggcaactgcaccagcccgcagactttatgcaatgctcaccaaaattgccctgatgggtctgatgaagaccgtcttctttgtgagaatcaccactgtgactccaatgaatggcagtgcgccaacaaacgttgcatcccagaatcctggcagtgtgacacatttaacgactgtgaggataactcagatgaagacagttcccactgtgccagcaggacctgccggccgggccagtttcggtgtgctaatggccgctgcatcccgcaggcctggaagtgtgatgtggataatgattgtggagaccactcggatgagcccattgaagaatgcatgagctctgcccatctctgtgacaacttcacagaattcagctgcaaaacaaattaccgctgcatcccaaagtgggccgtgtgcaatggtgtagatgactgcagggacaacagtgatgagcaaggctgtgaggagaggacatgccatcctgtgggggatttccgctgtaaaaatcaccactgcatccctcttcgttggcagtgtgatgggcaaaatgactgtggagataactcagatgaggaaaactgtgctccccgggagtgcacagagagcgagtttcgatgtgtcaatcagcagtgcattccctcgcgatggatctgtgaccattacaacgactgtggggacaactcagatgaacgggactgtgagatgaggacctgccatcctgaatattttcagtgtacaagtggacattgtgtacacagtgaactgaaatgcgatggatccgctgactgtttggatgcgtctgatgaagctgattgtcccacacgctttcctgatggtgcatactgccaggctactatgttcgaatgcaaaaaccatgtttgtatcccgccatattggaaatgtgatggcgatgatgactgtggcgatggttcagatgaagaacttcacctgtgcttggatgttccctgtaattcaccaaaccgtttccggtgtgacaacaatcgctgcatttatagtcatgaggtgtgcaatggtgtggatgactgtggagatggaactgatgagacagaggagcactgtagaaaaccgacccctaaaccttgtacagaatatgaatataagtgtggcaatgggcattgcattccacatgacaatgtgtgtgatgatgccgatgactgtggtgactggtccgatgaactgggttgcaataaaggaaaagaaagaacatgtgctgaaaatatatgcgagcaaaattgtacccaattaaatgaaggaggatttatctgctcctgtacagctgggttcgaaaccaatgtttttgacagaacctcctgtctagatatcaatgaatgtgaacaatttgggacttgtccccagcactgcagaaataccaaaggaagttatgagtgtgtctgtgctgatggcttcacgtctatgagtgaccgccctggaaaacgatgtgcagctgagggtagctctcctttgttgctactgcctgacaatgtccgaattcgaaaatataatctctcatctgagaggttctcagagtatcttcaagatgaggaatatatccaagctgttgattatgattgggatcccaaggacataggcctcagtgttgtgtattacactgtgcgaggggagggctctaggtttggtgctatcaaacgtgcctacatccccaactttgaatccggccgcaataatcttgtgcaggaagttgacctgaaactgaaatacgtaatgcagccagatggaatagcagtggactgggttggaaggcatatttactggtcagatgtcaagaataaacgcattgaggtggctaaacttgatggaaggtacagaaagtggctgatttccactgacctggaccaaccagctgctattgctgtgaatcccaaactagggcttatgttctggactgactggggaaaggaacctaaaatcgagtctgcctggatgaatggagaggaccgcaacatcctggttttcgaggaccttggttggccaactggcctttctatcgattatttgaacaatgaccgaatctactggagtgacttcaaggaggacgttattgaaaccataaaatatgatgggactgataggagagtcattgcaaaggaagcaatgaacccttacagcctggacatctttgaagaccagttatactggatatctaaggaaaagggagaagtatggaaacaaaataaatttgggcaaggaaagaaagagaaaacgctggtagtgaacccttggctcactcaagttcgaatctttcatcaactcagatacaataagtcagtgcccaacctttgcaaacagatctgcagccacctctgccttctgagacctggaggatacagctgtgcctgtccccaaggctccagctttatagaggggagcaccactgagtgtgatgcagccatcgaactgcctatcaacctgccccccccatgcaggtgcatgcacggaggaaattgctattttgatgagactgacctccccaaatgcaagtgtcctagcggctacaccggaaaatattgtgaaatggcgttttcaaaaggcatctctccaggaacaaccgcagtagctgtgctgttgacaatcctcttgatcgtcgtaattggagctctggcaattgcaggattcttccactatagaaggaccggctcccttttgcctgctctgcccaagctgccaagcttaagcagtctcgtcaagccctctgaaaatgggaatggggtgaccttcagatcaggggcagatcttaacatggatattggagtgtctggttttggacctgagactgctattgacaggtcaatggcaatgagtgaagactttgtcatggaaatggggaagcagcccataatatttgaaaacccaatgtactcagccagagacagtgctgtcaaagtggttcagccaatccaggtgactgtatctgaaaatgtggataataagaattatggaagtcccataaacccttctgagatagttccagagacaaacccaacttcaccagctgctgatggaactcaggtgacaaaatggaatctcttcaaacgaaaatctaaacaaactaccaactttgaaaatccaatctatgcacagatggagaacgagcaaaaggaaagtgttgctgcgacaccacctccatcaccttcgctccctgctaagcctaagcctccttcgagaagagacccaactccaacctattctgcaacagaagacacttttaaagacaccgcaaatcttgttaaagaagactctgaagtatagctataccagctatttagggaataattagaaacacacttttgcacatatattttttacaaacagatgaaaaaagttaacattcagtactttatgaaaaaaatatatttttccctgtttgcctatagttggaggtatcctgtgtgtctttttttacttatgccgtctcatatttttacaaataattatcacaatgtactatatgtatatctttgcactgaagttgtctgaaggtaatactataaatatattgtatatttgtaaattttggaaagattatcctgttactgaatttgctaataaagatgtctgctgatttggttggtgatcattatagtaaatgatccaacaagaaaaggaattgactggggacctttagccgtgtctaaagaagaggcaccactcatatttcctataaaattatctaggaaaggaatccaggccccgctcttgggtccatttttacacattagcacttaattaatgttcaatattacatgtcaatttgattaatggctatgttgataggggccactatgtgttgtatagacatctggacttgactgtagactcctcagataatacagaaggtaggaaaagcaattcagtttggcccttctgtgtgttggcattgtctaaccagaactctctgtttcatgtgtgttctctcactagctgccaagacaacatttttatttgtgatgtctatgaggaaatcccatatcattaagtgccagtgtcctgcattgagtttgtggttaattaaatgagctcttctgctgatggaccctggagcaatttctcccctcacctgacattcaaggtggtcacctgccctagtagttggagctcagtagctgaatttctgaaaccaaatctgtgtcttcataaaataaggtgcaaaaaaaaaaaataccagttaagtaaagcctcaactgggtttttgtttctatgaaaatatcattataatcactatttatttcctaagttgaacctgaatagaaagggaaaccattcttattaagctttttattaggccctgtggctaaatgtgtacatttatattagaatgtactgtacagtccagatcttttctttaattcttattggttttttttttttttttttttttagagatggagtcttgctatattgccaaggctgatcttgaagtcctgggctcaagtgatcctcccacctcagcctcctgagtggttggggttacgggcgtgagccactgtgcctggcttccagctctcctcttaaatagtgggtatagtctgcacaacaggaaccatggcaggaatatacactttcccatagcaaatagcatacctgactctctgtgctaatattgcacatttgttaaacaatgaatgaatggatggatggatggatggatgaatgaatgaaacatatactactgattattttattccagagttctcaaaatatttgttgctgatattttgagtgctgactgtaattactttgattagataaacaactggaaataatgctgctgaaaaagttctaataaatgtgtattttatcaga

SEQ ID NO: 130 - DNA, 15657 bp, Homo sapiens
  source 1..15657: mol_type = genomic DNA
aggcttttggccactaggagctggcggaggtgcagacctaaaggagcgttcgctagcagaggcgctgccggtgcggtgtgctacgcgcgcccacctcccggggaaggaacggcgaggccggggaccgtcgcggagatggatcgcgggccggcagcagtggcgtgcacgctgctcctggctctcgtcgcctgcctagcgccggccagtggccaagaatgtgacagtgcgcattttcgctgtggaagtgggcattgcatccctgcagactggaggtgtgatgggaccaaagactgttcagatgacgcggatgaaattggctgcgctgttgtgacctgccagcagggctatttcaagtgccagagtgagggacaatgcatccccaactcctgggtgtgtgaccaagatcaagactgtgatgatggctcagatgaacgtcaagattgctcacaaagtacatgctcaagtcatcagataacatgctccaatggtcagtgtatcccaagtgaatacaggtgcgaccacgtcagagactgccccgatggagctgatgagaatgactgccagtacccaacatgtgagcagcttacttgtgacaatggggcctgctataacaccagtcagaagtgtgattggaaagttgattgcagggactcctcagatgaaatcaactgcactgagatatgcttgcacaatgagttttcatgtggcaatggagagtgtatccctcgtgcttatgtctgtgaccatgacaatgattgccaagacggcagtgacgaacatgcttgcaactatccgacctgcggtggttaccagttcacttgccccagtggccgatgcatttatcaaaactgggtttgtgatggagaagatgactgtaaagataatggagatgaagatggatgtgaaagcggtcctcatgatgttcataaatgttccccaagagaatggtcttgcccagagtcgggacgatgcatctccatttataaagtttgtgatgggattttagattgcccaggaagagaagatgaaaacaacactagtaccggaaaatactgtagtatgactctgtgctctgccttgaactgccagtaccagtgccatgagacgccgtatggaggagcgtgtttttgtcccccaggttatatcatcaaccacaatgacagccgtacctgtgttgagtttgatgattgccagatatggggaatttgtgaccagaagtgtgaaagccgacctggccgtcacctgtgccactgtgaagaagggtatatcttggagcgtggacagtattgcaaagctaatgattcctttggcgaggcctccattatcttctccaatggtcgggatttgttaattggtgatattcatggaaggagcttccggatcctagtggagtctcagaatcgtggagtggccgtgggtgtggctttccactatcacctgcaaagagttttttggacagacaccgtgcaaaataaggttttttcagttgacattaatggtttaaatatccaagaggttctcaatgtttctgttgaaaccccagagaacctggctgtggactgggttaataataaaatctatctagtggaaaccaaggtcaaccgcatagatatggtaaatttggatggaagctatcgggttacccttataactgaaaacttggggcatcctagaggaattgccgtggacccaactgttggttatttatttttctcagattgggagagcctttctggggaacctaagctggaaagggcattcatggatggcagcaaccgtaaagacttggtgaaaacaaagctgggatggcctgctggggtaactctggatatgatatcgaagcgtgtttactgggttgactctcggtttgattacattgaaactgtaacttatgatggaattcaaaggaagactgtagttcatggaggctccctcattcctcatccctttggagtaagcttatttgaaggtcaggtgttctttacagattggacaaagatggccgtgctgaaggcaaacaagttcacagagaccaacccacaagtgtactaccaggcttccctgaggccctatggagtgactgtttaccattccctcagacagccctatgctaccaatccgtgtaaagataacaatgggggctgtgagcaggtctgtgtcctcagccacagaacagataatgatggtttgggtttccgttgcaagtgcacattcggcttccaactggatacagatgagcgccactgcattgctgttcagaatttcctcattttttcatcccaagttgctattcgtgggatcccgttcaccttgtctacccaggaagatgtcatggttccagtttcggggaatccttctttctttgtcgggattgattttgacgcccaggacagcactatctttttttcagatatgtcaaaacacatgatttttaagcaaaagattgatggcacaggaagagaaattctcgcagctaacagggtggaaaatgttgaaagtttggcttttgattggatttcaaagaatctctattggacagactctcattacaagagtatcagtgtcatgaggctagctgataaaacgagacgcacagtagttcagtatttaaataacccacggtcggtggtagttcatccttttgccgggtatctattcttcactgattggttccgtcctgctaaaattatgagagcatggagtgacggatctcacctcttgcctgtaataaacactactcttggatggcccaatggcttggccatcgattgggctgcttcacgattgtactgggtagatgcctattttgataaaattgagcacagcacctttgatggtttagacagaagaagactgggccatatagagcagatgacacatccgtttggacttgccatctttggagagcatttattttttactgactggagactgggtgccattattcgagtcaggaaagcagatggtggagaaatgacagttatccgaagtggcattgcttacatactgcatttgaaatcgtatgatgtcaacatccagactggttctaacgcctgtaatcaacccacgcatcctaacggtgactgcagccacttctgcttcccggtgccaaatttccagcgagtgtgtgggtgcccttatggaatgaggctggcttccaatcacttgacatgcgagggggacccaaccaatgaaccacccacagagcagtgtggcttattttccttcccctgtaaaaatggcagatgtgtgcccaattactatctctgtgatggagtcgatgattgtcatgataacagtgatgagcaactatgtggcacacttaataatacctgttcatcttcggcgttcacctgtggccatggggagtgcattcctgcacactggcgctgtgacaaacgcaacgactgtgtggatggcagtgatgagcacaactgccccacccacgcacctgcttcctgccttgacacccaatacacctgtgataatcaccagtgtatctcaaagaactgggtctgtgacacagacaatgattgtggggatggatctgatgaaaagaactgcaattcgacagagacatgccaacctagtcagtttaattgccccaatcatcgatgtattgacctatcgtttgtctgtgatggtgacaaggattgtgttgatggatctgatgaggttggttgtgtattaaactgtactgcttctcaattcaagtgtgccagtggggataaatgtattggcgtcacaaatcgttgtgatggtgtttttgattgcagtgacaactcggatgaagcaggctgtccaaccaggcctcctggtatgtgccactcagatgaatttcagtgccaagaagatggtatctgcatcccgaacttctgggaatgtgatgggcatccagactgcctctatggatctgatgagcacaatgcctgtgtccccaagacttgcccttcatcatatttccactgtgacaacggaaactgcatccacagggcatggctctgtgatcgggacaatgactgcggggatatgagtgatgagaaggactgccctactcagccctttcgctgtcctagttggcaatggcagtgtcttggccataacatctgtgtgaatctgagtgtagtgtgtgatggcatctttgactgccccaatgggacagatgagtccccactttgcaatgggaacagctgctcagatttcaatggtggttgtactcacgagtgtgttcaagagccctttggggctaaatgcctatgtccattgggattcttacttgccaatgattctaagacctgtgaagacatagatgaatgtgatattctaggctcttgtagccagcactgttacaatatgagaggttctttccggtgctcgtgtgatacaggctacatgttagaaagtgatgggaggacttgcaaagttacagcatctgagagtctgctgttacttgtggcaagtcagaacaaaattattgccgacagtgtcacctcccaggtccacaatatctattcattggtcgagaatggttcttacattgtagctgttgattttgattcaattagtggtcgtatcttttggtctgatgcaactcagggtaaaacctggagtgcgtttcaaaatggaacggacagaagagtggtatttgacagtagcatcatcttgactgaaactattgcaatagattgggtaggtcgtaatctttactggacagactatgctctggaaacaattgaagtctccaaaattgatgggagccacaggactgtgctgattagtaaaaacctaacaaatccaagaggactagcattagatcccagaatgaatgagcatctactgttctggtctgactggggccaccaccctcgcatcgagcgagccagcatggacggcagcatgcgcactgtcattgtccaggacaagatcttctggccctgcggcttaactattgactaccccaacagactgctctacttcatggactcctatcttgattacatggacttttgtgattataatggacaccatcggagacaggtgatagccagtgatttgattatacggcacccctatgccctaactctctttgaagactctgtgtactggactgaccgtgctactcgtcgggttatgcgagccaacaagtggcatggagggaaccagtcagttgtaatgtataatattcaatggccccttgggattgttgcggttcatccttcgaaacaaccaaattccgtgaatccatgtgccttttcccgctgcagccatctctgcctgctttcctcacaggggcctcatttttactcctgtgtttgtccttcaggatggagtctgtctcctgatctcctgaattgcttgagagatgatcaacctttcttaataactgtaaggcaacatataatttttggaatctcccttaatcctgaggtgaagagcaatgatgctatggtccccatagcagggatacagaatggtttagatgttgaatttgatgatgctgagcaatacatctattgggttgaaaatccaggtgaaattcacagagtgaagacagatggcaccaacaggacagtatttgcttctatatctatggtggggccttctatgaacctggccttagattggatttcaagaaacctttattctaccaatcctagaactcagtcaatcgaggttttgacactccacggagatatcagatacagaaaaacattgattgccaatgatgggacagctcttggagttggctttccaattggcataactgttgatcctgctcgtgggaagctgtactggtcagaccaaggaactgacagtggggttcctgccaagatcgccagtgctaacatggatggcacatctgtgaaaactctctttactgggaacctcgaacacctggagtgtgtcactcttgacatcgaagagcagaaactctactgggcagtcactggaagaggagtgattgaaagaggaaacgtggatggaacagatcgaatgatcctggtacaccagctttcccacccctggggaattgcagtccatgattctttcctttattatactgatgaacagtatgaggtcattgaaagagttgataaggccactggggccaacaaaatagtcttgagagataatgttccaaatctgaggggtcttcaagtttatcacagacgcaatgccgccgaatcctcaaatggctgtagcaacaacatgaatgcctgtcagcagatttgcctgcctgtaccaggaggattgttttcctgcgcctgtgccactggatttaaactcaatcctgataatcggtcctgctctccatataactctttcattgttgtttcaatgctgtctgcaatcagaggctttagcttggaattgtcagatcattcagaaaccatggtgccggtggcaggccaaggacgaaacgcactgcatgtggatgtggatgtgtcctctggctttatttattggtgtgattttagcagctcagtggcatctgataatgcgatccgtagaattaaaccagatggatcttctctgatgaacattgtgacacatggaataggagaaaatggagtccggggtattgcagtggattgggtagcaggaaatctttatttcaccaatgcctttgtttctgaaacactgatagaagttctgcggatcaatactacttaccgccgtgttcttcttaaagtcacagtggacatgcctaggcatattgttgtagatcccaagaacagatacctcttctgggctgactatgggcagagaccaaagattgagcgttctttccttgactgtaccaatcgaacagtgcttgtgtcagagggcattgtcacaccacggggcttggcagtggaccgaagtgatggctacgtttattgggttgatgattctttagatataattgcaaggattcgtatcaatggagagaactctgaagtgattcgttatggcagtcgttacccaactccttatggcatcactgtttttgaaaattctatcatatgggtagataggaatttgaaaaagatcttccaagccagcaaggaaccagagaacacagagccacccacagtgataagagacaatatcaactggctaagagatgtgaccatctttgacaagcaagtccagccccggtcaccagcagaggtcaacaacaacccttgcttggaaaacaatggtgggtgctctcatctctgctttgctctgcctggattgcacaccccaaaatgtgactgtgcctttgggaccctgcaaagtgatggcaagaattgtgccatttcaacagaaaatttcctcatctttgccttgtctaattccttgagaagcttacacttggaccctgaaaaccatagcccacctttccaaacaataaatgtggaaagaactgtcatgtctctagactatgacagtgtaagtgatagaatctacttcacacaaaatttagcctctggagttggacagatttcctatgccaccctgtcttcagggatccatactccaactgtcattgcttcaggtatagggactgctgatggcattgcctttgactggattactagaagaatttattacagtgactacctcaaccagatgattaattccatggctgaagatgggtctaaccgcactgtgatagcccgcgttccaaaaccaagagcaattgtgttagatccctgccaagggtacctgtactgggctgactgggatacacatgccaaaatcgagagagccacattgggaggaaacttccgcgtacccattgtgaacagcagtctggtcatgcccagtgggctgactctggactatgaagaggaccttctctactgggtggatgctagtctgcagaggattgaacgcagcactctgacgggcgtggatcgtgaagtcattgtcaatgcagccgttcatgcttttggcttgactctctatggccagtatatttactggactgacttgtacacacaaagaatttaccgagctaacaaatatgacgggtcaggtcagattgcaatgaccacaaatttgctctcccagcccaggggaatcaacactgttgtgaagaaccagaaacaacagtgtaacaatccttgtgaacagtttaatgggggctgcagccatatctgtgcaccaggtccaaatggtgccgagtgccagtgtccacatgagggcaactggtatttggccaacaacaggaagcactgcattgtggacaatggtgaacgatgtggtgcatcttccttcacctgctccaatgggcgctgcatctcggaagagtggaagtgtgataatgacaacgactgtggggatggcagtgatgagatggaaagtgtctgtgcacttcacacctgctcaccgacagccttcacctgtgccaatgggcgatgtgtccaatactcttaccgctgtgattactacaatgactgtggtgatggcagtgatgaggcagggtgcctgttcagggactgcaatgccaccacggagtttatgtgcaataacagaaggtgcatacctcgtgagtttatctgcaatggtgtagacaactgccatgataataacacttcagatgagaaaaattgccctgatcgcacttgccagtctggatacacaaaatgtcataattcaaatatttgtattcctcgcgtttatttgtgtgacggagacaatgactgtggagataacagtgatgaaaaccctacttattgcaccactcacacgtgcagcagcagtgagttccaatgcgcatctgggcgctgtattcctcaacattggtattgtgatcaagaaacagattgttttgatgcctctgatgaacctgcctcttgtggtcactctgagcgaacatgcctagctgatgagttcaagtgtgatggtgggaggtgcatcccaagcgaatggatctgtgacggtgataatgactgtggggatatgagtgacgaggataaaaggcaccagtgtcagaatcaaaactgctcggattccgagtttctctgtgtaaatgacagacctccggacaggaggtgcattccccagtcttgggtctgtgatggcgatgtggattgtactgacggctacgatgagaatcagaattgcaccaggagaacttgctctgaaaatgaattcacctgtggttacggactgtgtatcccaaagatattcaggtgtgaccggcacaatgactgtggtgactatagcgacgagaggggctgcttataccagacttgccaacagaatcagtttacctgtcagaacgggcgctgcattagtaaaaccttcgtctgtgatgaggataatgactgtggagacggatctgatgagctgatgcacctgtgccacaccccagaacccacgtgtccacctcacgagttcaagtgtgacaatgggcgctgcatcgagatgatgaaactctgcaaccacctagatgactgtttggacaacagcgatgagaaaggctgtggcattaatgaatgccatgacccttcaatcagtggctgcgatcacaactgcacagacaccttaaccagtttctattgttcctgtcgtcctggttacaagctcatgtctgacaagcggacttgtgttgatattgatgaatgcacagagatgccttttgtctgtagccagaagtgtgagaatgtaataggctcctacatctgtaagtgtgccccaggctacctccgagaaccagatggaaagacctgccggcaaaacagtaacatcgaaccctatctcatttttagcaaccgttactatttgagaaatttaactatagatggctatttttactccctcatcttggaaggactggacaatgttgtggcattagattttgaccgagtagagaagagattgtattggattgatacacagaggcaagtcattgagagaatgtttctgaataagacaaacaaggagacaatcataaaccacagactaccagctgcagaaagtctggctgtagactgggtttccagaaagctctactggttggatgcccgcctggatggcctctttgtctctgacctcaatggtggacaccgccgcatgctggcccagcactgtgtggatgccaacaacaccttctgctttgataatcccagaggacttgcccttcaccctcaatatgggtacctctactgggcagactggggtcaccgcgcatacattgggagagtaggcatggatggaaccaacaagtctgtgataatctccaccaagttagagtggcctaatggcatcaccattgattacaccaatgatctactctactgggcagatgcccacctgggttacatagagtactctgatttggagggccaccatcgacacacggtgtatgatggggcactgcctcaccctttcgctattaccatttttgaagacactatttattggacagattggaatacaaggacagtggaaaagggaaacaaatatgatggatcaaatagacagacactggtgaacacaacacacagaccatttgacatccatgtgtaccatccatataggcagcccattgtgagcaatccctgtggtaccaacaatggtggctgttctcatctctgcctcatcaagccaggaggaaaagggttcacttgcgagtgtccagatgacttccgcacccttcagctgagtggcagcacctactgcatgcccatgtgctccagcacccagttcctgtgcgctaacaatgaaaagtgcattcctatctggtggaaatgtgatggacagaaagactgctcagatggctctgatgaactggccctttgcccgcagcgcttctgccgactgggacagttccagtgcagtgacggcaactgcaccagcccgcagactttatgcaatgctcaccaaaattgccctgatgggtctgatgaagaccgtcttctttgtgagaatcaccactgtgactccaatgaatggcagtgcgccaacaaacgttgcatcccagaatcctggcagtgtgacacatttaacgactgtgaggataactcagatgaagacagttcccactgtgccagcaggacctgccggccgggccagtttcggtgtgctaatggccgctgcatcccgcaggcctggaagtgtgatgtggataatgattgtggagaccactcggatgagcccattgaagaatgcatgagctctgcccatctctgtgacaacttcacagaattcagctgcaaaacaaattaccgctgcatcccaaagtgggccgtgtgcaatggtgtagatgactgcagggacaacagtgatgagcaaggctgtgaggagaggacatgccatcctgtgggggatttccgctgtaaaaatcaccactgcatccctcttcgttggcagtgtgatgggcaaaatgactgtggagataactcagatgaggaaaactgtgctccccgggagtgcacagagagcgagtttcgatgtgtcaatcagcagtgcattccctcgcgatggatctgtgaccattacaacgactgtggggacaactcagatgaacgggactgtgagatgaggacctgccatcctgaatattttcagtgtacaagtggacattgtgtacacagtgaactgaaatgcgatggatccgctgactgtttggatgcgtctgatgaagctgattgtcccacacgctttcctgatggtgcatactgccaggctactatgttcgaatgcaaaaaccatgtttgtatcccgccatattggaaatgtgatggcgatgatgactgtggcgatggttcagatgaagaacttcacctgtgcttggatgttccctgtaattcaccaaaccgtttccggtgtgacaacaatcgctgcatttatagtcatgaggtgtgcaatggtgtggatgactgtggagatggaactgatgagacagaggagcactgtagaaaaccgacccctaaaccttgtacagaatatgaatataagtgtggcaatgggcattgcattccacatgacaatgtgtgtgatgatgccgatgactgtggtgactggtccgatgaactgggttgcaataaaggaaaagaaagaacatgtgctgaaaatatatgcgagcaaaattgtacccaattaaatgaaggaggatttatctgctcctgtacagctgggttcgaaaccaatgtttttgacagaacctcctgtctagatatcaatgaatgtgaacaatttgggacttgtccccagcactgcagaaataccaaaggaagttatgagtgtgtctgtgctgatggcttcacgtctatgagtgaccgccctggaaaacgatgtgcagctgagggtagctctcctttgttgctactgcctgacaatgtccgaattcgaaaatataatctctcatctgagaggttctcagagtatcttcaagatgaggaatatatccaagctgttgattatgattgggatcccaaggacataggcctcagtgttgtgtattacactgtgcgaggggagggctctaggtttggtgctatcaaacgtgcctacatccccaactttgaatccggccgcaataatcttgtgcaggaagttgacctgaaactgaaatacgtaatgcagccagatggaatagcagtggactgggttggaaggcatatttactggtcagatgtcaagaataaacgcattgaggtggctaaacttgatggaaggtacagaaagtggctgatttccactgacctggaccaaccagctgctattgctgtgaatcccaaactagggcttatgttctggactgactggggaaaggaacctaaaatcgagtctgcctggatgaatggagaggaccgcaacatcctggttttcgaggaccttggttggccaactggcctttctatcgattatttgaacaatgaccgaatctactggagtgacttcaaggaggacgttattgaaaccataaaatatgatgggactgataggagagtcattgcaaaggaagcaatgaacccttacagcctggacatctttgaagaccagttatactggatatctaaggaaaagggagaagtatggaaacaaaataaatttgggcaaggaaagaaagagaaaacgctggtagtgaacccttggctcactcaagttcgaatctttcatcaactcagatacaataagtcagtgcccaacctttgcaaacagatctgcagccacctctgccttctgagacctggaggatacagctgtgcctgtccccaaggctccagctttatagaggggagcaccactgagtgtgatgcagccatcgaactgcctatcaacctgccccccccatgcaggtgcatgcacggaggaaattgctattttgatgagactgacctccccaaatgcaagtgtcctagcggctacaccggaaaatattgtgaaatggcgttttcaaaaggcatctctccaggaacaaccgcagtagctgtgctgttgacaatcctcttgatcgtcgtaattggagctctggcaattgcaggattcttccactatagaaggaccggctcccttttgcctgctctgcccaagctgccaagcttaagcagtctcgtcaagccctctgaaaatgggaatggggtgaccttcagatcaggggcagatcttaacatggatattggagtgtctggttttggacctgagactgctattgacaggtcaatggcaatgagtgaagactttgtcatggaaatggggaagcagcccataatatttgaaaacccaatgtactcagccagagacagtgctgtcaaagtggttcagccaatccaggtgactgtatctgaaaatgtggataataagaattatggaagtcccataaacccttctgagatagttccagagacaaacccaacttcaccagctgctgatggaactcaggtgacaaaatggaatctcttcaaacgaaaatctaaacaaactaccaactttgaaaatccaatctatgcacagatggagaacgagcaaaaggaaagtgttgctgcgacaccacctccatcaccttcgctccctgctaagcctaagcctccttcgagaagagacccaactccaacctattctgcaacagaagacacttttaaagacaccgcaaatcttgttaaagaagactctgaagtatagctataccagctatttagggaataattagaaacacacttttgcacatatattttttacaaacagatgaaaaaagttaacattcagtactttatgaaaaaaatatatttttccctgtttgcctatagttggaggtatcctgtgtgtctttttttacttatgccgtctcatatttttacaaataattatcacaatgtactatatgtatatctttgcactgaagttgtctgaaggtaatactataaatatattgtatatttgtaaattttggaaagattatcctgttactgaatttgctaataaagatgtctgctgatttggttggtgatcattatagtaaatgatccaacaagaaaaggaattgactggggacctttagccgtgtctaaagaagaggcaccactcatatttcctataaaattatctaggaaaggaatccaggccccgctcttgggtccatttttacacattagcacttaattaatgttcaatattacatgtcaatttgattaatggctatgttgataggggccactatgtgttgtatagacatctggacttgactgtagactcctcagataatacagaaggtaggaaaagcaattcagtttggcccttctgtgtgttggcattgtctaaccagaactctctgtttcatgtgtgttctctcactagctgccaagacaacatttttatttgtgatgtctatgaggaaatcccatatcattaagtgccagtgtcctgcattgagtttgtggttaattaaatgagctcttctgctgatggaccctggagcaatttctcccctcacctgacattcaaggtggtcacctgccctagtagttggagctcagtagctgaatttctgaaaccaaatctgtgtcttcataaaataaggtgcaaaaaaaaaaaataccagttaagtaaagcctcaactgggtttttgtttctatgaaaatatcattataatcactatttatttcctaagttgaacctgaatagaaagggaaaccattcttattaagctttttattaggccctgtggctaaatgtgtacatttatattagaatgtactgtacagtccagatcttttctttaattcttattggttttttttttttttttttttttagagatggagtcttgctatattgccaaggctgatcttgaagtcctgggctcaagtgatcctcccacctcagcctcctgagtggttggggttacgggcgtgagccactgtgcctggcttccagctctcctcttaaatagtgggtatagtctgcacaacaggaaccatggcaggaatatacactttcccatagcaaatagcatacctgactctctgtgctaatattgcacatttgttaaacaatgaatgaatggatggatggatggatggatgaatgaatgaaacatatactactgattattttattccagagttctcaaaatatttgttgctgatattttgagtgctgactgtaattactttgattagataaacaactggaaataatgctgctgaaaaagttctaataaatgtgtattttatcaga

SEQ ID NO: 131 - DNA, 4007 bp, Homo sapiens
  source 1..4007: mol_type = genomic DNA
aggcttttggccactaggagctggcggaggtgcagacctaaaggagcgttcgctagcagaggcgctgccggtgcggtgtgctacgcgcgcccacctcccggggaaggaacggcgaggccggggaccgtcgcggagatggatcgcgggccggcagcagtggcgtgcacgctgctcctggctctcgtcgcctgcctagcgccggccagtggccaagaatgtgacagtgcgcattttcgctgtggaagtgggcattgcatccctgcagactggaggtgtgatgggaccaaagactgttcagatgacgcggatgaaattggctgcgctgttgtgacctgccagcagggctatttcaagtgccagagtgagggacaatgcatccccaactcctgggtgtgtgaccaagatcaagactgtgatgatggctcagatgaacgtcaagattgctcacaaagtacatgctcaagtcatcagataacatgctccaatggtcagtgtatcccaagtgaatacaggtgcgaccacgtcagagactgccccgatggagctgatgagaatgactgccagtacccaacatgtgagcagcttacttgtgacaatggggcctgctataacaccagtcagaagtgtgattggaaagttgattgcagggactcctcagatgaaatcaactgcactgagatatgcttgcacaatgagttttcatgtggcaatggagagtgtatccctcgtgcttatgtctgtgaccatgacaatgattgccaagacggcagtgacgaacatgcttgcaactatccgacctgcggtggttaccagttcacttgccccagtggccgatgcatttatcaaaactgggtttgtgatggagaagatgactgtaaagataatggagatgaagatggatgtgaaagcggtcctcatgatgttcataaatgttccccaagagaatggtcttgcccagagtcgggacgatgcatctccatttataaagtttgtgatgggattttagattgcccaggaagagaagatgaaaacaacactagtaccggaaaatactgtagtatgactctgtgctctgccttgaactgccagtaccagtgccatgagacgccgtatggaggagcgtgtttttgtcccccaggttatatcatcaaccacaatgacagccgtacctgtgttgagtttgatgattgccagatatggggaatttgtgaccagaagtgtgaaagccgacctggccgtcacctgtgccactgtgaagaagggtatatcttggagcgtggacagtattgcaaagctaatgattcctttggcgaggcctccattatcttctccaatggtcgggatttgttaattggtgatattcatggaaggagcttccggatcctagtggagtctcagaatcgtggagtggccgtgggtgtggctttccactatcacctgcaaagagttttttggacagacaccgtgcaaaataaggttttttcagttgacattaatggtttaaatatccaagaggttctcaatgtttctgttgaaaccccagagaacctggctgtggactgggttaataataaaatctatctagtggaaaccaaggtcaaccgcatagatatggtaaatttggatggaagctatcgggttacccttataactgaaaacttggggcatcctagaggaattgccgtggacccaactgttgggaagactgtagttcatggaggctccctcattcctcatccctttggagtaagcttatttgaaggtcaggtgttctttacagattggacaaagatggccgtgctgaaggcaaacaagttcacagagaccaacccacaagtgtactaccaggcttccctgaggccctatggagtgactgtttaccattccctcagacagccctatgctaccaatccgtgtaaagataacaatgggggctgtgagcaggtctgtgtcctcagccacagaacagataatgatggtttgggtttccgttgcaagtgcacattcggcttccaactggatacagatgagcgccactgcattggaagagaaattctcgcagctaacagggtggaaaatgttgaaagtttggcttttgattggatttcaaagaatctctattggacagactctcattacaagagtatcagtgtcatgaggctagctgataaaacgagacgcacagtagttcagtatttaaataacccacggtcggtggtagttcatccttttgccgggtatctattcttcactgattggttccgtcctgctaaaattatgagagcatggagtgacggatctcacctcttgcctgtaataaacactactcttggatggcccaatggcttggccatcgattgggctgcttcacgattgtactgggtagatgcctattttgataaaattgagcacagcacctttgatggtttagacagaagaagactgggccatatagagcagatgacacatccgtttggacttgccatctttggagagcatttattttttactgactggagactgggtgccattattcgagtcaggaaagcagatggtggagaaatgacagttatccgaagtggcattgcttacatactgcatttgaaatcgtatgatgtcaacatccagactggttctaacgcctgtaatcaacccacgcatcctaacggtgactgcagccacttctgcttcccggtgccaaatttccagcgagtgtgtgggtgcccttatggaatgaggctggcttccaatcacttgacatgcgagggggacccaaccaatgaaccacccacagagcagtgtggcttattttccttcccctgtaaaaatggcagatgtgtgcccaattactatctctgtgatggagtcgatgattgtcatgataacagtgatgagcaactatgtggcacacttaataatacctgttcatcttcggcgttcacctgtggccatggggagtgcattcctgcacactggcgctgtgacaaacgcaacgactgtgtggatggcagtgatgagcacaactgccccacccacgcacctgcttcctgccttgacacccaatacacctgtgataatcaccagtgtatctcaaagaactgggtctgtgacacagacaatgattgtggggatggatctgatgaaaagaactgcaattcgacagagacatgccaacctagtcagtttaattgccccaatcatcgatgtattgacctatcgtttgtctgtgatggtgacaaggattgtgttgatggatctgatgaggttggttgtgtattaaactgtactgcttctcaattcaagtgtgccagtggggataaatgtattggcgtcacaaatcgttgtgatggtgtttttgattgcagtgacaactcggatgaagcaggctgtccaaccaggcctcctggtatgtgccactcagatgaatttcagtgccaagaagatggtatctgcatcccgaacttctgggaatgtgatgggcatccagactgcctctatggatctgatgagcacaatgcctgtgtccccaagacttgcccttcatcatatttccactgtgacaacggaaactgcatccacagggcatggctctgtgatcgggacaatgactgcggggatatgagtgatgagaaggactgccctactcagccctttcgctgtcctagttggcaatggcagtgtcttggccataacatctgtgtgaatctgagtgtagtgtgtgatggcatctttgactgccccaatgggacagatgagtccccactttgcagtaagtttcctgaccacagtttactggccataaactcattctgaacagtagcctggtgtgcatcaccattgtcacagtcactgtgtagctttgtaggaaggatttcagttcctctatgagttcacatctgtgtagggggtaaccataattgaattcaaatacatcaccattggataattttctgattaaatcctttgtacttggttatgtgtttttacttctttttatgtctttgttt

SEQ ID NO: 132 - DNA, 14392 bp, Homo sapiens
  source 1..14392: mol_type = genomic DNA
gcagacctaaaggagcgttcgctagcagaggcgctgccggtgcggtgtgctacgcgcgcccacctcccggggaaggaacggcgaggccggggaccgtcgcggagatggatcgcgggccggcagcagtggcgtgcacgctgctcctggctctcgtcgcctgcctagcgccggccagtggccaagaatgtgacagtgcgcattttcgctgtggaagtgggcattgcatccctgcagactggaggtgtgatgggaccaaagactgttcagatgacgcggatgaaattggctgcgctgttgtgacctgccagcagggctatttcaagtgccagagtgagggacaatgcatccccagctcctgggtgtgtgaccaagatcaagactgtgatgatggctcagatgaacgtcaagattgctcacaaagtacatgctcaagtcatcagataacatgctccaatggtcagtgtatcccaagtgaatacaggtgcgaccacgtcagagactgccccgatggagctgatgagaatgactgccagtacccaacatgtgagcagcttacttgtgacaatggggcctgctataacaccagtcagaagtgtgattggaaagttgattgcagggactcctcagatgaaatcaactgcactgagatatgcttgcacaatgagttttcatgtggcaatggagagtgtatccctcgtgcttatgtctgtgaccatgacaatgattgccaagacggcagtgatgaacatgcttgcaactatccgacctgcggtggttaccagttcacttgccccagtggccgatgcatttatcaaaactgggtttgtgatggagaagatgactgtaaagataatggagatgaagatggatgtgaaagcggtcctcatgatgttcataaatgttccccaagagaatggtcttgcccagagtcgggacgatgcatctccatttataaagtttgtgatgggattttagattgcccaggaagagaagatgaaaacaacactagtaccggaaaatactgtagtatgactctgtgctctgccttgaactgccagtaccagtgccatgagacgccgtatggaggagcgtgtttttgtcccccaggttatatcatcaaccacaatgacagccgtacctgtgttgagtttgatgattgccagatatggggaatttgtgaccagaagtgtgaaagccgacctggccgtcacctgtgccactgtgaagaagggtatatcttggagcgtggacagtattgcaaagctaatgattcctttggcgaggcctccattatcttctccaatggtcgggatttgttaattggtgatattcatggaaggagcttccggatcctagtggagtctcagaatcgtggagtggccgtgggtgtggctttccactatcacctgcaaagagttttttggacagacaccgtgcaaaataaggttttttcagttgacattaatggtttaaatatccaagaggttctcaatgtttctgttgaaaccccagagaacctggctgtggactgggttaataataaaatctatctagtggaaaccaaggtcaaccgcatagatatggtaaatttggatggaagctatcgggttacccttataactgaaaacttggggcatcctagaggaattgccgtggacccaactgttggttatttatttttctcagattgggagagcctttctggggaacctaagctggaaagggcattcatggatggcagcaaccgtaaagacttggtgaaaacaaagctgggatggcctgctggggtaactctggatatgatatcgaagcgtgtttactgggttgactctcggtttgattacattgaaactgtaacttatgatggaattcaaaggaagactgtagttcatggaggctccctcattcctcatccctttggagtaagcttatttgaaggtcaggtgttctttacagattggacaaagatggccgtgctgaaggcaaacaagttcacagagaccaacccacaagtgtactaccaggcttccctgaggccctatggagtgactgtttaccattccctcagacagccctatgctaccaatccgtgtaaagataacaatgggggctgtgagcaggtctgtgttctcagccacagaacagataatgatggtttgggtttccgttgcaagtgcacattcggcttccaactggatacagatgagcgccactgcattgctgttcagaatttcctcattttttcatcccaagttgctattcgtgggatcccgttcaccttgtctacccaggaagatgtcatggttccagtttcggggaatccttctttctttgtcgggattgattttgacgcccaggacagcactatctttttttcagatatgtcaaaacacatgatttttaagcaaaagattgatggcacaggaagagaaattctcgcagctaacagggtggaaaatgttgaaagtttggcttttgattggatttcaaagaatctctattggacagactctcattacaagagtatcagtgtcatgaggctagctgataaaacgagacgcacagtagttcagtatttaaataacccacggtcggtggtagttcatccttttgccgggtatctattcttcactgattggttccgtcctgctaaaattatgagagcatggagtgacggatctcacctcttgcctgtaataaacactactcttggatggcccaatggcttggccatcgattgggctgcttcacgattgtactgggtagatgcctattttgataaaattgagcacagcacctttgatggtttagacagaagaagactgggccatatagagcagatgacacatccgtttggacttgccatctttggagagcatttattttttactgactggagactgggtgccattattcgagtcaggaaagcagatggtggagaaatgacagttatccgaagtggcattgcttacatactgcatttgaaatcgtatgatgtcaacatccagactggttctaacgcctgtaatcaacccacgcatcctaacggtgactgcagccacttctgcttcccggtgccaaatttccagcgagtgtgtgggtgcccttatggaatgaggctggcttccaatcacttgacatgcgagggggacccaaccaatgaaccacccacggagcagtgtggcttattttccttcccctgtaaaaatggcagatgtgtgcccaattactatctctgtgatggagtcgatgattgtcatgataacagtgatgagcaactatgtggcacacttaataatacctgttcatcttcggcgttcacctgtggccatggggagtgcattcctgcacactggcgctgtgacaaacgcaacgactgtgtggatggcagtgatgagcacaactgccccacccacgcacctgcttcctgccttgacacccaatacacctgtgataatcaccagtgtatctcaaagaactgggtctgtgacacagacaatgattgtggggatggatctgatgaaaagaactgcaattcgacagagacatgccaacctagtcagtttaattgccccaatcatcgatgtattgacctatcgtttgtctgtgatggtgacaaggattgtgttgatggatctgatgaggttggttgtgtattaaactgtactgcttctcaattcaagtgtgccagtggggataaatgtattggcgtcacaaatcgttgtgatggtgtttttgattgcagtgacaactcggatgaagcgggctgtccaaccaggcctcctggtatgtgccactcagatgaatttcagtgccaagaagatggtatctgcatcccgaacttctgggaatgtgatgggcatccagactgcctctatggatctgatgagcacaatgcctgtgtccccaagacttgcccttcatcatatttccactgtgacaacggaaactgcatccacagggcatggctctgtgatcgggacaatgactgcggggatatgagtgatgagaaggactgccctactcagccctttcgctgtcctagttggcaatggcagtgtcttggccataacatctgtgtgaatctgagtgtagtgtgtgatggcatctttgactgccccaatgggacagatgagtccccactttgcaatgggaacagctgctcagatttcaatggtggttgtactcacgagtgtgttcaagagccctttggggctaaatgcctatgtccattgggattcttacttgccaatgattctaagacctgtgaagacatagatgaatgtgatattctaggctcttgtagccagcactgttacaatatgagaggttctttccggtgctcgtgtgatacaggctacatgttagaaagtgatgggaggacttgcaaagttacagcatctgagagtctgctgttacttgtggcaagtcagaacaaaattattgccgacagtgtcacctcccaggtccacaatatctattcattggtcgagaatggttcttacattgtagctgttgattttgattcaattagtggtcgtatcttttggtctgatgcaactcagggtaaaacctggagtgcgtttcaaaatggaacggacagaagagtggtatttgacagtagcatcatcttgactgaaactattgcaatagattgggtaggtcgtaatctttactggacagactatgctctggaaacaattgaagtctccaaaattgatgggagccacaggactgtgctgattagtaaaaacctaacaaatccaagaggactagcattagatcccagaatgaatgagcatctactgttctggtctgactggggccaccaccctcgcatcgagcgagccagcatggacggcagcatgcgcactgtcattgtccaggacaagatcttctggccctgcggcttaactattgactaccccaacagactgctctacttcatggactcctatcttgattacatggacttttgcgattataatggacaccatcggagacaggtgatagccagtgatttgattatacggcacccctatgccctaactctctttgaagactctgtgtactggactgaccgtgctactcgtcgggttatgcgagccaacaagtggcatggagggaaccagtcagttgtaatgtataatattcaatggccccttgggattgttgcggttcatccttcgaaacaaccaaattccgtgaatccatgtgccttttcccgctgcagccatctctgcctgctttcctcacaggggcctcatttttactcctgtgtttgtccttcaggatggagtctgtctcctgatctcctgaattgcttgagagatgatcaacctttcttaataactgtaaggcaacatataatttttggaatctcccttaatcctgaggtgaagagcaatgatgctatggtccccatagcagggatacagaatggtttagatgttgaatttgatgatgctgagcaatacatctattgggttgaaaatccaggtgaaattcacagagtgaagacagatggcaccaacaggacagtatttgcttctatatctatggtggggccttctatgaacctggccttagattggatttcaagaaacctttattctaccaatcctagaactcagtcaatcgaggttttgacactccacggagatatcagatacagaaaaacattgattgccaatgatgggacagctcttggagttggctttccaattggcataactgttgatcctgctcgtgggaagctgtactggtcagaccaaggaactgacagtggggttcctgccaagatcgccagtgctaacatggatggcacatctgtgaaaactctctttactgggaacctcgaacacctggagtgtgtcactcttgacatcgaagagcagaaactctactgggcagtcactggaagaggagtgattgaaagaggaaacgtggatggaacagatcggatgatcctggtacaccagctttcccacccctggggaattgcagtccatgattctttcctttattatactgatgaacagtatgaggtcattgaaagagttgataaggccactggggccaacaaaatagtcttgagagataatgttccaaatctgaggggtcttcaagtttatcacagacgcaatgccgccgaatcctcaaatggctgtagcaacaacatgaatgcctgtcagcagatttgcctgcctgtaccaggaggattgttttcctgcgcctgtgccactggatttaaactcaatcctgataatcggtcctgctctccatataactctttcattgttgtttcaatgctgtctgcaatcagaggctttagcttggaattgtcagatcattcagaaaccatggtgccggtggcaggccaaggacgaaacgcactgcatgtggatgtggatgtgtcctctggctttatttattggtgtgattttagcagctcagtggcatctgataatgcgatccgtagaattaaaccagatggatcttctctgatgaacattgtgacacatggaataggagaaaatggagtccggggtattgcagtggattgggtagcaggaaatctttatttcaccaatgcctttgtttctgaaacactgatagaagttctgcggatcaatactacttaccgccgtgttcttcttaaagtcacagtggacatgcctaggcatattgttgtagatcccaagaacagatacctcttctgggctgactatgggcagagaccaaagattgagcgttctttccttgactgtaccaatcgaacagtgcttgtgtcagagggcattgtcacaccacggggcttggcagtggaccgaagtgatggctacgtttattgggttgatgattctttagatataattgcaaggattcgtatcaatggagagaactctgaagtgattcgttatggcagtcgttacccaactccttatggcatcactgtttttgaaaattctatcatatgggtagataggaatttgaaaaagatcttccaagccagcaaggaaccagagaacacagagccacccacagtgataagagacaatatcaactggctaagagatgtgaccatctttgacaagcaagtccagccccggtcaccagcagaggtcaacaacaacccttgcttggaaaacaatggtgggtgctctcatctctgctttgctctgcctggattgcacaccccaaaatgtgactgtgcctttgggaccctgcaaagtgatggcaagaattgtgccatttcaacagaaaatttcctcatctttgccttgtctaattccttgagaagcttacacttggaccctgaaaaccatagcccacctttccaaacaataaatgtggaaagaactgtcatgtctctagactatgacagtgtaagtgatagaatctacttcacacaaaatttagcctctggagttggacagatttcctatgccaccctgtcttcagggatccatactccaactgtcattgcttcaggtatagggactgctgatggcattgcctttgactggattactagaagaatttattacagtgactacctcaaccagatgattaattccatggctgaagatgggtctaaccgcactgtgatagcccgcgttccaaaaccaagagcaattgtgttagatccctgccaagggtacctgtactgggctgactgggatacacatgccaaaatcgagagagccacattgggaggaaacttccgggtacccattgtgaacagcagtctggtcatgcccagtgggctgactctggactatgaagaggaccttctctactgggtggatgctagtctgcagaggattgaacgcagcactctgacgggcgtggatcgtgaagtcattgtcaatgcagccgttcatgcttttggcttgactctctatggccagtatatttactggactgacttgtacacacaaagaatttaccgagctaacaaatatgacgggtcaggtcagattgcaatgaccacaaatttgctctcccagcccaggggaatcaacactgttgtgaagaaccagaaacaacagtgtaacaatccttgtgaacagtttaatgggggctgcagccatatctgtgcaccaggtccaaatggtgccgagtgccagtgtccacatgagggcaactggtatttggccaacaacaggaagcactgcattgtggacaatggtgaacgatgtggtgcatcttccttcacctgctccaatgggcgctgcatctcggaagagtggaagtgtgataatgacaacgactgtggggatggcagtgatgagatggaaagtgtctgtgcacttcacacctgctcaccgacagccttcacctgtgccaatgggcgatgtgtccaatactcttaccgctgtgattactacaatgactgtggtgatggcagtgatgaggcagggtgcctgttcagggactgcaatgccaccacggagtttatgtgcaataacagaaggtgcatacctcgtgagtttatctgcaatggtgtagacaactgccatgataataacacttcagatgagaaaaattgccctgatcgcacttgccagtctggatacacaaaatgtcataattcaaatatttgtattcctcgcgtttatttgtgtgacggagacaatgactgtggagataacagtgatgaaaaccctacttattgcaccactcacacatgcagcagcagtgagttccaatgcgcatctgggcgctgtattcctcaacattggtattgtgatcaagaaacagattgttttgatgcctctgatgaacctgcctcttgtggtcactctgagcgaacatgcctagctgatgagttcaagtgtgatggtgggaggtgcatcccaagcgaatggatctgtgacggtgataatgactgtggggatatgagtgacgaggataaaaggcaccagtgtcagaatcaaaactgctcggattccgagtttctctgtgtaaatgacagacctccggacaggaggtgcattccccagtcttgggtctgtgatggcgatgtggattgtactgacggctacgatgagaatcagaattgcaccaggagaacttgctctgaaaatgaattcacctgtggttacggactgtgtatcccaaagatattcaggtgtgaccggcacaatgactgtggtgactatagcgacgagaggggctgcttataccagacttgccaacagaatcagtttacctgtcagaacgggcgctgcattagtaaaaccttcgtctgtgatgaggataatgactgtggagacggatctgatgagctgatgcacctgtgccacaccccagaacccacgtgtccacctcacgagttcaagtgtgacaatgggcgctgcatcgagatgatgaaactctgcaaccacctagatgactgtttggacaacagcgatgagaaaggctgtggcattaatgaatgccatgacccttcaatcagtggctgcgatcacaactgcacagacaccttaaccagtttctattgttcctgtcgtcctggttacaagctcatgtctgacaagcggacttgtgttgatattgatgaatgcacagagatgccttttgtctgtagccagaagtgtgagaatgtaataggctcctacatctgtaagtgtgccccaggctacctccgagaaccagatggaaagacctgccggcaaaacagtaacatcgaaccctatctcatttttagcaaccgttactatttgagaaatttaactatagatggctatttttactccctcatcttggaaggactggacaatgttgtggcattagattttgaccgagtagagaagagattgtattggattgatacacagaggcaagtcattgagagaatgtttctgaataagacaaacaaggagacaatcataaaccacagactaccagctgcagaaagtctggctgtagactgggtttccagaaagctctactggttggatgcccgcctggatggcctctttgtctctgacctcaatggtggacaccgccgcatgctggcccagcactgtgtggatgccaacaacaccttctgctttgataatcccagaggacttgcccttcaccctcaatatgggtacctctactgggcagactggggtcaccgcgcatacattgggagagtaggcatggatggaaccaacaagtctgtgataatctccaccaagttagagtggcctaatggcatcaccattgattacaccaatgatctactctactgggcagatgcccacctgggttacatagagtactctgatttggagggccaccatcgacacacggtgtatgatggggcactgcctcaccctttcgctattaccatttttgaagacactatttattggacagattggaatacaaggacagtggaaaagggaaacaaatatgatggatcaaatagacagacactggtgaacacaacacacagaccatttgacatccatgtgtaccatccatataggcagcccattgtgagcaatccctgtggtaccaacaatggtggctgttctcatctctgcctcatcaagccaggaggaaaagggttcacttgcgagtgtccagatgacttccgcacccttcaactgagtggcagcacctactgcatgcccatgtgctccagcacccagttcctgtgcgctaacaatgaaaagtgcattcctatctggtggaaatgtgatggacagaaagactgctcagatggctctgatgaactggccctttgcccgcagcgcttctgccgactgggacagttccagtgcagtgacggcaactgcaccagcccgcagactttatgcaatgctcaccaaaattgccctgatgggtctgatgaagaccgtcttctttgtgagaatcaccactgtgactccaatgaatggcagtgcgccaacaaacgttgcatcccagaatcctggcagtgtgacacatttaacgactgtgaggataactcagatgaagacagttcccactgtgccagcaggacctgccggccgggccagtttcggtgtgctaatggccgctgcatcccgcaggcctggaagtgtgatgtggataatgattgtggagaccactcggatgagcccattgaagaatgcatgagctctgcccatctctgtgacaacttcacagaattcagctgcaaaacaaattaccgctgcatcccaaagtgggccgtgtgcaatggtgtagatgactgcagggacaacagtgatgagcaaggctgtgaggagaggacatgccatcctgtgggggatttccgctgtaaaaatcaccactgcatccctcttcgttggcagtgtgatgggcaaaatgactgtggagataactcagatgaggaaaactgtgctccccgggagtgcacagagagcgagtttcgatgtgtcaatcagcagtgcattccctcgcgatggatctgtgaccattacaacgactgtggggacaactcagatgaacgggactgtgagatgaggacctgccatcctgaatattttcagtgtacaagtggacattgtgtacacagtgaactgaaatgcgatggatccgctgactgtttggatgcgtctgatgaagctgattgtcccacacgctttcctgatggtgcatactgccaggctactatgttcgaatgcaaaaaccatgtttgtatcccgccatattggaaatgtgatggcgatgatgactgtggcgatggttcagatgaagaacttcacctgtgcttggatgttccctgtaattcaccaaaccgtttccggtgtgacaacaatcgctgcatttatagtcatgaggtgtgcaatggtgtggatgactgtggagatggaactgatgagacagaggagcactgtagaaaaccgacccctaaaccttgtacagaatatgaatataagtgtggcaatgggcattgcattccacatgacaatgtgtgtgatgatgccgatgactgtggtgactggtccgatgaactgggttgcaataaaggaaaagaaagaacatgtgctgaaaatatatgcgagcaaaattgtacccaattaaatgaaggaggatttatctgctcctgtacagctgggttcgaaaccaatgtttttgacagaacctcctgtctagatatcaatgaatgtgaacaatttgggacttgtccccagcactgcagaaataccaaaggaagttatgagtgtgtctgtgctgatggcttcacgtctatgagtgaccgccctggaaaacgatgtgcagctgagggtagctctcctttgttgctactgcctgacaatgtccgaattcgaaaatataatctctcatctgagaggttctcagagtatcttcaagatgaggaatatatccaagctgttgattatgattgggatcccaaggacataggcctcagtgttgtgtattacactgtgcgaggggagggctctaggtttggtgctatcaaacgtgcctacatccccaactttgaatccggccgcaataatcttgtgcaggaagttgacctgaaactgaaatacgtaatgcagccagatggaatagcagtggactgggttggaaggcatatttactggtcagatgtcaagaataaacgcattgaggtggctaaacttgatggaaggtacagaaagtggctgatttccactgacctggaccaaccagctgctattgctgtgaatcccaaactagggcttatgttctggactgactggggaaaggaacctaaaatcgagtctgcctggatgaatggagaggaccgcaacatcctggttttcgaggaccttggttggccaactggcctttctatcgattatttgaacaatgaccgaatctactggagtgacttcaaggaggacgttattgaaaccataaaatatgatgggactgataggagagtcattgcaaaggaagcaatgaacccttacagcctggacatctttgaagaccagttatactggatatctaaggaaaagggagaagtatggaaacaaaataaatttgggcaaggaaagaaagagaaaacgctggtagtgaacccttggctcactcaagttcgaatctttcatcaactcagatacaataagtcagtgcccaacctttgcaaacagatctgcagccacctctgccttctgagacctggaggatacagctgtgcctgtccccaaggctccagctttatagaggggagcaccactgagtgtgatgcagccatcgaactgcctatcaacctgccccccccatgcaggtgcatgcacggaggaaattgctattttgatgagactgacctccccaaatgcaagtgtcctagcggctacaccggaaaatattgtgaaatggcgttttcaaaaggcatctctccaggaacaaccgcagtagctgtgctgttgacaatcctcttgatcgtcgtaattggagctctggcaattgcaggattcttccactatagaaggaccggctcccttttgcctgctctgcccaagctgccaagcttaagcagtctcgtcaagccctctgaaaatgggaatggggtgaccttcagatcaggggcagatcttaacatggatattggagtgtctggttttggacctgagactgctattgacaggtcaatggcaatgagtgaagactttgtcatggaaatggggaagcagcccataatatttgaaaacccaatgtactcagccagagacagtgctgtcaaagtggttcagccaatccaggtgactgtatctgaaaatgtggataataagaattatggaagtcccataaacccttctgagatagttccagagacaaacccaacttcaccagctgctgatggaactcaggtgacaaaatggaatctcttcaaacgaaaatctaaacaaactaccaactttgaaaatccaatctatgcacagatggagaacgagcaaaaggaaagtgttgctgcgacaccacctccatcaccttcgctccctgctaagcctaagcctccttcgagaagagacccaactccaacctattctgcaacagaagacacttttaaagacaccgcaaatcttgttaaagaagactctgaagtatagctataccagctatttagggaataattagaaacacacttttgcacatatattttttacaaacagatgaaaaaagttaacattcagtactttatgaaaaaaatatatttttccctgtttgcctataggtggaggtatcctgtgtgtctttttttacttatgccgtctcatatttttacaaataattatcacaatgtactatatgtatatctttgcactgaagttgtctgaaggtaatactataaatatattgtatatttgtaaattttggaaagattatcctgttactgaatttgctaataaagatgtctgctgaaaaaaaa

SEQ ID NO: 133 - DNA, 14044 bp, Homo sapiens
  source 1..14044: mol_type = genomic DNA
tgcggtgtgctacgcgcgcccacctcccggggaaggaacggcgaggccggggaccgtcgcggagatggatcgcgggccggcagcagtggcgtgcacgctgctcctggctctcgtcgcctgcctagccccggccagtggccaagaatgtgacagtgcgcattttcgctgtggaagtgggcattgcatccctgcagactggaggtgtgatgggaccaaagactgttcagatgacgcggatgaaattggctgcgctgttgtgacctgccagcagggctatttcaagtgccagagtgagggacaatgcatccccagctcctgggtgtgtgaccaagatcaagactgtgatgatggctcagatgaacgtcaagattgctcacaaagtacatgctcaagtcatcagataacatgctccaatggtcagtgtatcccaagtgaatacaggtgcgaccacgtcagagactgccccgatggagctgatgagaatgactgccagtacccaacatgtgagcagcttacttgtgacaatggggcctgctataacaccagtcagaagtgtgattggaaagttgattgcagggactcctcagatgaaatcaactgcactgagatatgcttgcacaatgagttttcatgtggcaatggagagtgtatccctcgtgcttatgtctgtgaccatgacaatgattgccaagacggcagtgacgaacatgcttgcaactatccgacctgcggtggttaccagttcacttgccccagtggccgatgcatttatcaaaactgggtttgtgatggagaagatgactgtaaagataatggagatgaagatggatgtgaaagcggtcctcatgatgttcataaatgttccccaagagaatggtcttgcccagagtcgggacgatgcatctccatttataaagtttgtgatgggattttagattgcccaggaagagaagatgaaaacaacactagtaccggaaaatactgtagtatgactctgtgctctgccttgaactgccagtaccagtgccatgagacgccgtatggaggagcgtgtttttgtcccccaggttatatcatcaaccacaatgacagccgtacctgtgttgagtttgatgattgccagatatggggaatttgtgaccagaagtgtgaaagccgacctggccgtcacctgtgccactgtgaagaagggtatatcttggagcgtggacagtattgcaaagctaatgattcctttggcgaggcctccattatcttctccaatggtcgggatttgttaattggtgatattcatggaaggagcttccggatcctagtggagtctcagaatcgtggagtggccgtgggtgtggctttccactatcacctgcaaagagttttttggacagacaccgtgcaaaataaggttttttcagttgacattaatggtttaaatatccaagaggttctcaatgtttctgttgaaaccccagagaacctggctgtggactgggttaataataaaatctatctagtggaaaccaaggtcaaccgcatagatatggtaaatttggatggaagctatcgggttacccttataactgaaaacttggggcatcctagaggaattgccgtggacccaactgttggttatttatttttctcagattgggagagcctttctggggaacctaagctggaaagggcattcatggatggcagcaaccgtaaagacttggtgaaaacaaagctgggatggcctgctggggtaactctggatatgatatcgaagcgtgtttactgggttgactctcggtttgattacattgaaactgtaacttatgatggaattcaaaggaagactgtagttcatggaggctccctcattcctcatccctttggagtaagcttatttgaaggtcaggtgttctttacagattggacaaagatggccgtgctgaaggcaaacaagttcacagagaccaacccacaagtgtactaccaggcttccctgaggccctatggagtgactgtttaccattccctcagacagccctatgctaccaatccgtgtaaagataacaatgggggctgtgagcaggtctgtgtyctcagccacagaacagataatgatggtttgggtttccgttgcaagtgcacattcggcttccaactggatacagatgagcgccactgcattgctgttcagaatttcctcattttttcatcccaagttgctattcgtgggatcccgttcaccttgtctacccaggaagatgtcatggttccagtttcggggaatccttctttctttgtcgggattgattttgacgcccaggacagcactatctttttttcagatatgtcaaaacacatgatttttaagcaaaagattgatggcacaggaagagaaattctcgcagctaacagggtggaaaatgttgaaagtttggcttttgattggatttcaaagaatctctattggacagactctcattacaagagtatcagtgtcatgaggctagctgataaaacgagacgcacggtagttcagtatttaaataacccacggtcggtggtagttcatccttttgccgggtatctattcttcactgattggttccgtcctgctaaaattatgagagcatggagtgacggatctcacctcttgcctgtaataaacactactcttggatggcccaatggcttggccatcgattgggctgcttcacgattgtactgggtagatgcctattttgataaaattgagcacagcacctttgatggtttagacagaagaagactgggccatatagagcagatgacacatccgtttggacttgccatctttggagagcatttattttttactgactggagactgggtgccattattcgagtcaggaaagcagatggtggagaaatgacagttatccgaagtggcattgcttacatactgcatttgaaatcgtatgatgtcaacatccagactggttctaacgcctgtaatcaacccacgcatcctaacggtgactgcagccacttctgcttcccggtgccaaatttccagcgagtgtgtgggtgcccttatggaatgaggctggcttccaatcacttgacatgcgagggggacccaacmaatgaaccacccacggagcagtgtggcttattttccttcccctgtaaaaatggcagatgtgtgcccaattactatctctgtgatggagtcgatgattgtcatgataacagtgatgagcaactatgtggcacacttaataatacctgttcatcttcggcgttcacctgtggccatggggagtgcattcctgcacactggcgctgtgacaaacgcaacgactgtgtggatggcagtgatgagcacaactgccccacccacgcacctgcttcctgccttgacacccaatacacctgtgataatcaccagtgtatctcaaagaactgggtctgtgacacagacaatgattgtggggatggatctgatgaaaagaactgcaattcgacagagacatgccaacctagtcagtttaattgccccaatcatcgatgtattgacctatcgtttgtctgtgatggtgacaaggattgtgttgatggatctgatgaggttggttgtgtattaaactgtactgcttctcaattcaagtgtgccagtggggataaatgtattggcgtcacaaatcgttgtgatggtgtttttgattgcagtgacaactcggatgaagcgggctgtccaaccaggcctcctggtatgtgccactcagatgaatttcagtgccaagaagatggtatctgcatcccgaacttctgggaatgtgatgggcatccagactgcctctatggatctgatgagcacaatgcctgtgtccccaagacttgcccttcatcatatttccactgtgacaacggaaactgcatccacagggcatggctctgtgatcgggacaatgactgcggggatatgagtgatgagaaggactgccctactcagccctttcgctgtcctagttggcaatggcagtgtcttggccataacatctgtgtgaatctgagtgtagtgtgtgatggcatctttgactgccccaatgggacagatgagtccccactttgcaatgggaacagctgctcagatttcaatggtggttgtactcacgagtgtgttcaagagccctttggggctaaatgcctatgtccattgggattcttacttgccaatgattctaagacctgtgaagacatagatgaatgtgatattctaggctcttgtagccagcactgttacaatatgagaggttctttccggtgctcgtgtgatacaggctacatgttagaaagtgatgggaggacttgcaaagttacagcatctgagagtctgctgttacttgtggcaagtcagaacaaaattattgccgacagtgtcacctcccaggtccacaatatctattcattggtcgagaatggttcttacattgtagctgttgattttgattcaattagtggtcgtatcttttggtctgatgcaactcagggtaaaacctggagtgcgtttcaaaatggaacggacagaagagtggtatttgacagtagcatcatcttgactgaaactattgcaatagattgggtaggtcgtaatctttactggacagactatgctctggaaacaattgaagtctccaaaattgatgggagccacaggactgtgctgattagtaaaaacctaacaaatccaagaggactagcattagatcccagaatgaatgagcatctactgttctggtctgactggggccaccaccctcgcatcgagcgagccagcatggacggcagcatgcgcactgtcattgtccaggacaagatcttctggccctgcggcttaactattgactaccccaacagactgctctacttcatggactcctatcttgattacatggacttttgtgattataatggacaccatcggagacaggtgatagccagtgatttgattatacggcacccctatgccctaactctctttgaagactctgtgtactggactgaccgtgctactcgtcgggttatgcgagccaacaagtggcatggagggaaccagtcagttgtaatgtataatattcaatggccccttgggattgttgcggttcatccttcgaaacaaccaaattccgtgaatccatgtgccttttcccgctgcagccatctctgcctgctttcctcacaggggcctcatttttactcctgtgtttgtccttcaggatggagtctgtctcctgatctcctgaattgcttgagagatgatcaacctttcttaataactgtaaggcaacatataatttttggaatctcccttaatcctgaggtgaagagcaatgatgctatggtccccatagcagggatacagaatggtttagatgttgaatttgatgatgctgagcaatacatctattgggttgaaaatccaggtgaaattcacagagtgaagacagatggcaccaacaggacagtatttgcttctatatctatggtggggccttctatgaacctggccttagattggatttcaagaaacctttattctaccaatcctagaactcagtcaatcgaggttttgacactccacggagatatcagatacagaaaaacattgattgccaatgatgggacagctcttggagttggctttccaattggcataactgttgatcctgctcgtgggaagctgtactggtcagaccaaggaactgacagtggggttcctgccaagatcgccagtgctaacatggatggcacatctgtgaaaactctctttactgggaacctcgaacacctggagtgtgtcactcttgacatcgaagagcagaaactctactgggcagtcactggaagaggagtgattgaaagaggaaacgtggatggaacagatcgaatgatcctggtacaccagctttcccacccctggggaattgcagtccatgattctttcctttattatactgatgaacagtatgaggtcattgaaagagttgataaggccactggggccaacaaaatagtcttgagagataatgttccaaatctgaggggtcttcaagtttatcacagacgcaatgccgccgaatcctcaaatggctgtagcaacaacatgaatgcctgtcagcagatttgcctgcctgtaccaggaggattgttttcctgcgcctgtgccactggatttaaactcaatcctgataatcggtcctgctctccatataactctttcattgttgtttcaatgctgtctgcaatcagaggctttagcttggaattgtcagatcattcagaaaccatggtgccggtggcaggccaaggacgaaacgcactgcatgtggatgtggatgtgtcctctggctttatttattggtgtgattttagcagctcagtggcatctgataatgcgatccgtagaattaaaccagatggatcttctctgatgaacattgtgacacatggaataggagaaaatggagtccggggtattgcagtggattgggtagcaggaaatctttatttcaccaatgcctttgtttctgaaacactgatagaagttctgcggatcaatactacttaccgccgtgttcttcttaaagtcacagtggacatgcctaggcatattgttgtagatcccaagaacagatacctcttctgggctgactatgggcagagaccaaagattgagcgttctttccttgactgtaccaatcgaacagtgcttgtgtcagagggcattgtcacaccacggggcttggcagtggaccgaagtgatggctacgtttattgggttgatgattctttagatataattgcaaggattcgtatcaatggagagaactctgaagtgattcgttatggcagtcgttacccaactccttatggcatcactgtttttgaaaattctatcatatgggtagataggaatttgaaaaagatcttccaagccagcaaggaaccagagaacacagagccacccacagtgataagagacaatatcaactggctaagagatgtgaccatctttgacaagcaagtccagccccggtcaccagcagaggtcaacaacaacccttgcttggaaaacaatggtgggtgctctcatctctgctttgctctgcctggattgcacaccccaaaatgtgactgtgcctttgggaccctgcaaagtgatggcaagaattgtgccatttcaacagaaaatttcctcatctttgccttgtctaattccttgagaagcttacacttggaccctgaaaaccatagcccacctttccaaacaataaatgtggaaagaactgtcatgtctctagactatgacagtgtaagtgatagaatctacttcacacaaaatttagcctctggagttggacagatttcctatgccaccctgtcttcagggatccatactccaactgtcattgcttcaggtatagggactgctgatggcattgcctttgactggattactagaagaatttattacagtgactacctcaaccagatgattaattccatggctgaagatgggtctaaccgcactgtgatagcccgcgttccaaaaccaagagcaattgtgttagatccctgccaagggtacctgtactgggctgactgggatacacatgccaaaatcgagagagccacattgggaggaaacttccgcgtacccattgtgaacagcagtctggtcatgcccagtgggctgactctggactatgaagaggaccttctctactgggtggatgctagtctgcagaggattgaacgcagcactctgacgggcgtggatcgtgaagtcattgtcaatgcagccgttcatgcttttggcttgactctctatggccagtatatttactggactgacttgtacacacaaagaatttaccgagctaacaaatatgacgggtcaggtcagattgcaatgaccacaaatttgctctcccagcccaggggaatcaacactgttgtgaagaaccagaaacaacagtgtaacaatccttgtgaacagtttaatgggggctgcagccatatctgtgcaccaggtccaaatggtgccgagtgccagtgtccacatgagggcaactggtatttggccaacaacaggaagcactgcattgtggacaatggtgaacgatgtggtgcatcttccttcacctgctccaatgggcgctgcatctcggaagagtggaagtgtgataatgacaacgactgtggggatggcagtgatgagatggaaagtgtctgtgcacttcacacctgctcaccgacagccttcacctgtgccaatgggcgatgtgtccaatactcttaccgctgtgattactacaatgactgtggtgatggcagtgatgaggcagggtgcctgttcagggactgcaatgccaccacggagtttatgtgcaataacagaaggtgcatacctcgtgagtttatctgcaatggtgtagacaactgccatgataataacacttcagatgagaaaaattgccctgatcgcacttgccagtctggatacacaaaatgtcataattcaaatatttgtattcctcgcgtttatttgtgtgacggagacaatgactgtggagataacagtgatgaaaaccctacttattgcaccactcacacgtgcagcagcagtgagttccaatgcgcatctgggcgctgtattcctcaacattggtattgtgatcaagaaacagattgttttgatgcctctgatgaacctgcctcttgtggtcactctgagcgaacatgcctagctgatgagttcaagtgtgatggtgggaggtgcatcccaagcgaatggatctgtgacggtgataatgactgtggggatatgagtgacgaggataaaaggcaccagtgtcagaatcaaaactgctcggattccgagtttctctgtgtaaatgacagacctccggacaggaggtgcattccccagtcttgggtctgtgatggcgatgtggattgtactgacggctacgatgagaatcagaattgcaccaggagaacttgctctgaaaatgaattcacctgtggttacggactgtgtatcccaaagatattcaggtgtgaccggcacaatgactgtggtgactatagcgacgagaggggctgcttataccagacttgccaacagaatcagtttacctgtcagaacgggcgctgcattagtaaaaccttcgtctgtgatgaggataatgactgtggagacggatctgatgagctgatgcacctgtgccacaccccagaacccacgtgtccacctcacgagttcaagtgtgacaatgggcgctgcatcgagatgatgaaactctgcaaccacctagatgactgtttggacaacagcgatgagaaaggctgtggcattaatgaatgccatgacccttcaatcagtggctgcgatcacaactgcacagacaccttaaccagtttctattgttcctgtcgtcctggttacaagctcatgtctgacaagcggacttgtgttgatattgatgaatgcacagagatgccttttgtctgtagccagaagtgtgagaatgtaataggctcctacatctgtaagtgtgccccaggctacctccgagaaccagatggaaagacctgccggcaaaacagtaacatcgaaccctatctcatttttagcaaccgttactatttgagaaatttaactatagatggctatttttactccctcatcttggaaggactggacaatgttgtggcattagattttgaccgagtagagaagagattgtattggattgatacacagaggcaagtcattgagagaatgtttctgaataagacaaacaaggagacaatcataaaccacagactaccagctgcagaaagtctggctgtagactgggtttccagaaagctctactggttggatgcccgcctggatggcctctttgtctctgacctcaatggtggacaccgccgcatgctggcccagcactgtgtggatgccaacaacaccttctgctttgataatcccagaggacttgcccttcaccctcaatatgggtacctctactgggcagactggggtcaccgcgcatacattgggagagtaggcatggatggaaccaacaagtctgtgataatctccaccaagttagagtggcctaatggcatcaccattgattacaccaatgatctactctactgggcagatgcccacctgggttacatagagtactctgatttggagggccaccatcgacacacggtgtatgatggggcactgcctcaccctttcgctattaccatttttgaagacactatttattggacagattggaatacaaggacagtggaaaagggaaacaaatatgatggatcaaatagacagacactggtgaacacaacacacagaccatttgacatccatgtgtaccatccatataggcagcccattgtgagcaatccctgtggtaccaacaatggtggctgttctcatctctgcctcatcaagccaggaggaaaagggttcacttgcgagtgtccagatgacttccgcacccttcaactgagtggcagcacctactgcatgcccatgtgctccagcacccagttcctgtgcgctaacaatgaaaagtgcattcctatctggtggaaatgtgatggacagaaagactgctcagatggctctgatgaactggccctttgcccgcagcgcttctgccgactgggacagttccagtgcagtgacggcaactgcaccagcccgcagactttatgcaatgctcaccaaaattgccctgatgggtctgatgaagaccgtcttctttgtgagaatcaccactgtgactccaatgaatggcagtgcgccaacaaacgttgcatcccagaatcctggcagtgtgacacatttaacgactgtgaggataactcagatgaagacagttcccactgtgccagcaggacctgccggccgggccagtttcggtgtgctaatggccgctgcatcccgcaggcctggaagtgtgatgtggataatgattgtggagaccactcggatgagcccattgaagaatgcatgagctctgcccatctctgtgacaacttcacagaattcagctgcaaaacaaattaccgctgcatcccaaagtgggccgtgtgcaatggtgtagatgactgcagggacaacagtgatgagcaaggctgtgaggagaggacatgccatcctgtgggggatttccgctgtaaaaatcaccactgcatccctcttcgttggcagtgtgatgggcaaaatgactgtggagataactcagatgaggaaaactgtgctccccgggagtgcacagagagcgagtttcgatgtgtcaatcagcagtgcattccctcgcgatggatctgtgaccattacaacgactgtggggacaactcagatgaacgggactgtgagatgaggacctgccatcctgaatattttcagtgtacaagtggacattgtgtacacagtgaactgaaatgcgatggatccgctgactgtttggatgcgtctgatgaagctgattgtcccacacgctttcctgatggtgcatactgccaggctactatgttcgaatgcaaaaaccatgtttgtatcccgccatattggaaatgtgatggcgatgatgactgtggcgatggttcagatgaagaacttcacctgtgcttggatgttccctgtaattcaccaaaccgtttccggtgtgacaacaatcgctgcatttatagtcatgaggtgtgcaatggtgtggatgactgtggagatggaactgatgagacagaggagcactgtagaaaaccgacccctaaaccttgtacagaatatgaatataagtgtggcaatgggcattgcattccacatgacaatgtgtgtgatgatgccgatgactgtggtgactggtccgatgaactgggttgcaataaaggaaaagaaagaacatgtgctgaaaatatatgcgagcaaaattgtacccaattaaatgaaggaggatttatctgctcctgtacagctgggttcgaaaccaatgtttttgacagaacctcctgtctagatatcaatgaatgtgaacaatttgggacttgtccccagcactgcagaaataccaaaggaagttatgagtgtgtctgtgctgatggcttcacgtctatgagtgaccgccctggaaaacgatgtgcagctgagggtagctctcctttgttgctactgcctgacaatgtccgaattcgaaaatataatctctcatctgagaggttctcagagtatcttcaagatgaggaatatatccaagctgttgattatgattgggatcccgaggacataggcctcagtgttgtgtattacactgtgcgaggggagggctctaggtttggtgctatcaaacgtgcctacatccccaactttgaatccggccgcaataatcttgtgcaggaagttgacctgaaactgaaatacgtaatgcagccagatggaatagcagtggactgggttggaaggcatatttactggtcagatgtcaagaataaacgcattgaggtggctaaacttgatggaaggtacagaaagtggctgatttccactgacctggaccaaccagctgctattgctgtgaatcccaaactagggcttatgttctggactgactggggaaaggaacctaaactcgagtctgcctggatgaatggagaggaccgcaacatcctggttttcgaggaccttggttggccaactggcctttctatcgattatttgaacaatgaccgaatctactggagtgacttcaaggaggacgttattgaaaccataaaatatgatgggactgataggagagtcattgcaaaggaagcaatgaacccttacagcctggacatctttgaagaccagttatactggatatctaaggaaaagggagaagtatggaaacaaaataaatttgggcaaggaaagaaagagaaaacgctggtagtgaacccttggctcactcaagttcgaatctttcatcaactcagatacaataagtcagtgcccaacctttgcaaacagatctgcagccacctctgccttctgagacctggaggatacagctgtgcctgtccccaaggctccagctttatagaggggagcaccactgagtgtgatgcagccattgaactgcctatcaacctgccccccccatgcaggtgcatgcacggaggaaattgctattttgatgagactgacctccccaaatgcaagtgtcctagcggctacaccggaaaatattgtgaaatggcgttttcaaaaggcatctctccaggaacaaccgcagtagctgtgctgttgacaatcctcttgatcgtcgtaattggagctctggcaattgcaggattcttccactatagaaggaccggctcccttttgcctgctctgcccaagctgccaagcttaagcagtctcgtcaagccctctgaaaatgggaatggggtgaccttcagatcaggggcagatcttaacatggatattggagtgtctggttttggacctgagactgctattgacaggtcaatggcaatgagtgaagactttgtcatggaaatggggaagcagcccataatatttgaaaacccaatgtactcagccagagacagtgctgtcaaagtggttcagccaatccaggtgactgtatctgaaaatgtggataataagaattatggaagtcccataaacccttctgagatagttccagagacaaacccaacttcaccagctgctgatggaactcaggtgacaaaatggaatctcttcaaacgaaaatctaaacaaactaccaactttgaaaatccaatctatgcacagatggagaacgagcaaaaggaaagtgttgctgcgacaccacctccatcaccttcgctccctgctaagcctaagcctccttcgagaagagacccaactccaacctattctgcaacagaagacacttttaaagacaccgcaaatcttgttaaagaagactctgaagtatagctataccagcta

SEQ ID NO: 134 - DNA, 14042 bp, Homo sapiens
  source 1..14042: mol_type = genomic DNA
cggtgcggtgtgctacgcgcgcccacctcccggggaaggaacggcgaggccggggaccgtcgcggagatggatcgcgggccggcagcagtggcgtgcacgctgctcctggctctcgtcgcctgcctagccccggccagtggccaagaatgtgacagtgcgcattttcgctgtggaagtgggcattgcatccctgcagactggaggtgtgatgggaccaaagactgttcagatgacgcggatgaaattggctgcgctgttgtgacctgccagcagggctatttcaagtgccagagtgagggacaatgcatccccagctcctgggtgtgtgaccaagatcaagactgtgatgatggctcagatgaacgtcaagattgctcacaaagtacatgctcaagtcatcagataacatgctccaatggtcagtgtatcccaagtgaatacaggtgcgaccacgtcagagactgccccgatggagctgatgagaatgactgccagtacccaacatgtgagcagcttacttgtgacaatggggcctgctataacaccagtcagaagtgtgattggaaagttgattgcagggactcctcagatgaaatcaactgcactgagatatgcttgcacaatgagttttcatgtggcaatggagagtgtatccctcgtgcttatgtctgtgaccatgacaatgattgccaagacggcagtgaygaacatgcttgcaactatccgacctgcggtggttaccagttcacttgccccagtggccgatgcatttatcaaaactgggtttgtgatggagaagatgactgtaaagataatggagatgaagatggatgtgaaagcggtcctcatgatgttcataaatgttccccaagagaatggtcttgcccagagtcgggacgatgcatctccatttataaagtttgtgatgggattttagattgcccaggaagagaagatgaaaacaacactagtaccggaaaatactgtagtatgactctgtgctctgccttgaactgccagtaccagtgccatgagacgccgtatggaggagcgtgtttttgtcccccaggttatatcatcaaccacaatgacagccgtacctgtgttgagtttgatgattgccagatatggggaatttgtgaccagaagtgtgaaagccgacctggccgtcacctgtgccactgtgaagaagggtatatcttggagcgtggacagtattgcaaagctaatgattcctttggcgaggcctccattatcttctccaatggtcgggatttgttaattggtgatattcatggaaggagcttccggatcctagtggagtctcagaatcgtggagtggccgtgggtgtggctttccactatcacctgcaaagagttttttggacagacaccgtgcaaaataaggttttttcagttgacattaatggtttaaatatccaagaggttctcaatgtttctgttgaaaccccagagaacctggctgtggactgggttaataataaaatctatctagtggaaaccaaggtcaaccgcatagatatggtaaatttggatggaagctatcgggttacccttataactgaaaacttggggcatcctagaggaattgccgtggacccaactgttggttatttatttttctcagattgggagagcctttctggggaacctaagctggaaagggcattcatggatggcagcaaccgtaaagacttggtgaaaacaaagctgggatggcctgctggggtaactctggatatgatatcgaagcgtgtttactgggttgactctcggtttgattacattgaaactgtaacttatgatggaattcaaaggaagactgtagttcatggaggctccctcattcctcatccctttggagtaagcttatttgaaggtcaggtgttctttacagattggacaaagatggccgtgctgaaggcaaacaagttcacagagaccaacccacaagtgtactaccaggcttccctgaggccctatggagtgactgtttaccattccctcagacagccctatgctaccaatccgtgtaaagataacaatgggggctgtgagcaggtctgtgtyctcagccacagaacagataatgatggtttgggtttccgttgcaagtgcacattcggcttccaactggatacagatgagcgccactgcattgctgttcagaatttcctcattttttcatcccaagttgctattcgtgggatcccgttcaccttgtctacccaggaagatgtcatggttccagtttcggggaatccttctttctttgtcgggattgattttgacgcccaggacagcactatctttttttcagatatgtcaaaacacatgatttttaagcaaaagattgatggcacaggaagagaaattctcgcagctaacagggtggaaaatgttgaaagtttggcttttgactggatttcaaagaatctctattggacagactctcattacaagagtatcagtgtcatgaggctagctgataaaacgagacgcacggtagttcagtatttaaataacccacggtcggtggtagttcatccttttgccgggtatctattcttcactgattggttccgtcctgctaaaattatgagagcatggagtgacggatctcacctcttgcctgtaataaacactactcttggatggcccaatggcttggccatcgattgggctgcttcacgattgtactgggtagatgcctattttgataaaattgagcacagcacctttgatggtttagacagaagaagactgggccatatagagcagatgacacatccgtttggacttgccatctttggagagcatttattttttactgactggagactgggtgccattattcgagtcaggaaagcagatggtggagaaatgacagttatccgaagtggcattgcttacatactgcatttgaaatcgtatgatgtcaacatccagactggttctaacgcctgtaatcaacccacgcatcctaacggtgactgcagccacttctgcttcccggtgccaaatttccagcgagtgtgtgggtgcccttatggaatgaggctggcttccaatcacttgacatgcgagggggacccaacaaatgaaccacccacggagcagtgtggcttattttccttcccctgtaaaaatggcagatgtgtgcccaattactatctctgtgatggagtcgatgattgtcatgataacagtgatgagcaactatgtggcacacttaataatacctgttcatcttcggcgttcacctgtggccatggggagtgcattcctgcacactggcgctgtgacaaacgcaacgactgtgtggatggcagtgatgagcacaactgccccacccacgcacctgcttcctgccttgacacccaatacacctgtgataatcaccagtgtatctcaaagaactgggtctgtgacacagacaatgattgtggggatggatctgatgaaaagaactgcaattcgacagagacatgccaacctagtcagtttaattgccccaatcatcgatgtattgacctatcgtttgtctgtgatggtgacaaggattgtgttgatggatctgatgaggttggttgtgtattaaactgtactgcttctcaattcaagtgtgccagtggggataaatgtattggcgtcacaaatcgttgtgatggtgtttttgattgcagtgacaactcggatgaagcgggctgtccaaccaggcctcctggtatgtgccactcagatgaatttcagtgccaagaagatggtatctgcatcccgaacttctgggaatgtgatgggcatccagactgcctctatggatctgatgagcacaatgcctgtgtccccaagacttgccchtcatcatatttccactgtgacaacggaaactgcatccacaggscatggctctgtgatcgggacaatgactgcggggatatgagtgatgagaaggactgccctactcagccctttcgctgtcctagttggcaatggcagtgtcttggccataacatctgtgtgaatctgagtgtagtgtgtgatggcatctttgactgccccaatgggacagatgagtccccactttgcaatgggaacagctgctcagatttcaatggtggttgtactcacgagtgtgttcaagagccctttggggctaaatgcctatgtccattgggattcttacttgccaatgattctaagacctgtgaagacatagatgaatgtgatattctaggctcttgtagccagcactgttacaatatgagaggttctttccggtgctcgtgtgatacaggctacatgttagaaagtgatgggaggacttgcaaagttacagcatctgagagtctgctgttacttgtggcaagtcagaacaaaattattgccgacagtgtcacctcccaggtccacaatatctattcattggtcgagaatggttcttacattgtagctgttgattttgattcaattagtggtcgtatcttttggtctgatgcaactcagggtaaaacctggagtgcgtttcaaaatggaacggacagaagagtggtatttgacagtagcatcatcttgactgaaactattgcaatagattgggtaggtcgtaatctttactggacagactatgctctggaaacaattgaagtctccaaaattgatgggagccacaggactgtgctgattagtaaaaacctaacaaatccaagaggactagcattagatcccagaatgaatgagcatctactgttctggtctgactggggccaccaccctcgcatcgagcgagccagcatggacggcagcatgcgcactgtcattgtccaggacaagatcttctggccctgcggcttaactattgactaccccaacagactgctctacttcatggactcctatcttgattacatggacttttgcgattataatggacaccatcggagacaggtgatagccagtgatttgattatacggcacccctatgccctaactctctttgaagactctgtgtactggactgaccgtgctactcgtcgggttatgcgagccaacaagtggcatggagggaaccagtcagttgtaatgtataatattcaatggccccttgggattgttgcggttcatccttcgaaacaaccaaattctgtgaatccatgtgccttttcccgctgcagccatctctgcctgctttcctcacaggggcctcatttttactcctgtgtttgtccttcaggatggagtctgtctcctgatctcctgaattgcttgagagatgatcaacctttcttaataactgtaaggcaacatataatttttggaatctcccttaatcctgaggtgaagagcaatgatgctatggtccccatagcagggatacagaatggtttagatgttgaatttgatgatgctgagcaatacatctattgggttgaaaatccaggtgaaattcacagagtgaagacagatggcaccaacaggacagtatttgcttctatatctatggtggggccttctatgaacctggccttagattggatttcaagaaacctttattctaccaatcctagaactcagtcaatcgaggttttgacactccacggagatatcagatacagaaaaacattgattgccaatgatgggacagctcttggagttggctttccaattggcataactgttgatcctgctcgtgggaagctgtactggtcagaccaaggaactgacagtggggttcctgccaagatcgccagtgctaacatggatggcacatctgtgaaaactctctttactgggaacctcgaacacctggagtgtgtcactcttgacatcgaagagcagaaactctactgggcagtcactggaagaggagtgattgaaagaggaaacgtggatggaacagatcggatgatcctggtacaccagctttcccacccctggggaattgcagtccatgattctttcctttattatactgatgaacagtatgaggtcattgaaagagttgataaggccactggggccaacaaaatagtcttgagagataatgttccaaatctgaggggtcttcaagtttatcacagacgcaatgccgccgaatcctcaaatggctgtagcaacaacatgaatgcctgtcagcagatttgcctgcctgtaccaggaggattgttttcctgcgcctgtgccactggatttaaactcaatcctgataatcggtcctgctctccatataactctttcattgttgtttcaatgctgtctgcaatcagaggctttagcttggaattgtcagatcattcagaaaccatggtgccggtggcaggccaaggacgaaacgcactgcatgtggatgtggatgtgtcctctggctttatttattggtgtgattttagcagctcagtggcatctgataatgcgatccgtagaattaaaccagatggatcttctctgatgaacattgtgacacatggaataggagaaaatggagtccggggtattgcagtggattgggtagcaggaaatctttatttcaccaatgcctttgtttctgaaacactgatagaagttctgcggatcaatactacttaccgccgtgttcttcttaaagtcacagtggacatgcctaggcatattgttgtagatcccaagaacagatacctcttctgggctgactatgggcagagaccaaagattgagcgttctttccttgactgtaccaatcgaacagtgcttgtgtcagagggcattgtcacaccacggggcttggcagtggaccgaagtgatggctacgtttattgggttgatgattctttagatataattgcaaggattcgtatcaatggagagaactctgaagtgattcgttatggcagtcgttacccaactccttatggcatcactgtttttgaaaattctatcatatgggtagataggaatttgaaaaagatcttccaagccagcaaggaaccagagaacacagagccacccacagtgataagagacaatatcaactggctaagagatgtgaccatctttgacaagcaagtccagccccggtcaccagcagaggtcaacaacaacccttgcttggaaaacaatggtgggtgctctcatctctgctttgctctgcctggattgcacaccccaaaatgtgactgtgcctttgggaccctgcaaagtgatggcaagaattgtgccatttcaacagaaaatttcctcatctttgccttgtctaattccttgagaagcttacacttggaccctgaaaaccatagcccacctttccaaacaataaatgtggaaagaactgtcatgtctctagactatgacagtgtaagtgatagaatctacttcacacaaaatttagcctctggagttggacagatttcctatgccaccctgtcttcagggatccatactccaactgtcattgcttcaggtatagggactgctgatggcattgcctttgactggattactagaagaatttattacagtgactacctcaaccagatgattaattccatggctgaagatgggtctaaccgcactgtgatagcccgcgttccaaaaccaagagcaattgtgttagatccctgccaagggtacctgtactgggctgactgggatacacatgccaaaatcgagagagccacattgggaggaaacttccgcgtacccattgtgaacagcagtctggtcatgcccagtgggctgactctggactatgaagaggaccttctctactgggtggatgctagtctgcagaggattgaacgcagcactctgacgggcgtggatcgtgaagtcattgtcaatgcagccgttcatgcttttggcttgactctctatggccagtatatttactggactgacttgtacacacaaagaatttaccgagctaacaaatatgacgggtcaggtcagattgcaatgaccacaaatttgctctcccagcccaggggaatcaacactgttgtgaagaaccagaaacaacagtgtaacaatccttgtgaacagtttaatgggggctgcagccatatctgtgcaccaggtccaaatggtgccgagtgccagtgtccacatgagggcaactggtatttggccaacaacaggaagcactgcattgtggacaatggtgaacgatgtggtgcatcttccttcacctgctccaatgggcgctgcatctcggaagagtggaagtgtgataatgacaacgactgtggggatggcagtgatgagatggaaagtgtctgtgcacttcacacctgctcaccgacagccttcacctgtgccaatgggcgatgtgtccaatactcttaccgctgtgattactacaatgactgtggtgatggcagtgatgaggcagggtgcctgttcagggactgcaatgccaccacggagtttatgtgcaataacagaaggtgcatacctcgtgagtttatctgcaatggtgtagacaactgccatgataataacacttcagatgagaaaaattgccctgatcgcacttgccagtctggatacacaaaatgtcataattcaaatatttgtattcctcgcgtttatttgtgtgacggagacaatgactgtggagataacagtgatgaaaaccctacttattgcaccactcacacgtgcagcagcagtgagttccaatgcacatctgggcgctgtattcctcaacattggtattgtgatcaagaaacagattgttttgatgcctctgatgaacctgcctcttgtggtcactctgagcgaacatgcctagctgatgagttcaagtgtgatggtgggaggtgcatcccaagcgaatggatctgtgacggtgataatgactgtggggatatgagtgacgaggataaaaggcaccagtgtcagaatcaaaactgctcggattccgagtttctctgtgtaaatgacagacctccggacaggaggtgcattccccagtcttgggtctgtgatggcgatgtggattgtactgacggctacgatgagaatcagaattgcaccaggagaacttgctctgaaaatgaattcacctgtggttacggactgtgtatcccaaagatattcaggtgtgaccggcacaatgactgtggtgactatagcgacgagaggggctgcttataccagacttgccaacagaatcagtttacctgtcagaacgggcgctgcattagtaaaaccttcgtctgtgatgaggataatgactgtggagacggatctgatgagctgatgcacctgtgccacaccccagaacccacgtgtccacctcacgagttcaagtgtgacaatgggcgctgcatcgagatgatgaaactctgcaaccacctagatgactgtttggacaacagcgatgagaaaggctgtggcattaatgaatgccatgacccttcaatcagtggctgcgatcacaactgcacagacaccttaaccagtttctattgttcctgtcgtcctggttacaagctcatgtctgacaagcggacttgtgttgatattgatgaatgcacagagatgccttttgtctgtagccagaagtgtgagaatgtaataggctcctacatctgtaagtgtgccccaggctacctccgagaaccagatggaaagacctgccggcaaaacagtaacatcgaaccctatctcatttttagcaaccgttactatttgagaaatttaactatagatggctatttttactccctcatcttggaaggactggacaatgttgtggcattagattttgaccgagtagagaagagattgtattggattgatacacagaggcaagtcattgagagaatgtttctgaataagacaaacaaggagacaatcataaaccacagactaccagctgcagaaagtctggctgtagactgggtttccagaaagctctactggttggatgcccgcctggatggcctctttgtctctgacctcaatggtggacaccgccgcatgctggcccagcactgtgtggatgccaacaacaccttctgctttgataatcccagaggacttgcccttcaccctcaatatgggtacctctactgggcagactggggtcaccgcgcatacattgggagagtaggcatggatggaaccaacaagtctgtgataatctccaccaagttagagtggcctaatggcatcaccattgattacaccaatgatctactctactgggcagatgcccacctgggttacatagagtactctgatttggagggccaccatcgacacacggtgtatgatggggcactgcctcaccctttcgctattaccatttttgaagacactatttattggacagattggaatacaaggacagtggaaaagggaaacaaatatgatggatcaaatagacagacactggtgaacacaacacacagaccatttgacatccatgtgtaccatccatataggcagcccattgtgagcaatccctgtggtaccaacaatggtggctgttctcatctctgcctcatcaagccaggaggaaaagggttcacttgcgagtgtccagatgacttccgcacccttcagctgagtggcagcacctactgcatgcccatgtgctccagcacccagttcctgtgcgctaacaatgaaaagtgcattcctatctggtggaaatgtgatggacagaaagactgctcagatggctctgatgaactggccctttgcccgcagcgcttctgccgactgggacagttccagtgcagtgacggcaactgcaccagcccgcagactttatgcaatgctcaccaaaattgccctgatgggtctgatgaagaccgtcttctttgtgagaatcaccactgtgactccaatgaatggcagtgcgccaacaaacgttgcatcccagaatcctggcagtgtgacacatttaacgactgtgaggataactcagatgaagacagttcccactgtgccagcaggacctgccggccgggccagtttcggtgtgctaatggccgctgcatcccgcaggcctggaagtgtgatgtggataatgattgtggagaccactcggatgagcccattgaagaatgcatgagctctgcccatctctgtgacaacttcacagaattcagctgcaaaacaaattaccgctgcatcccaaagtgggccgtgtgcaatggtgtagatgactgcagggacaacagtgatgagcaaggctgtgaggagaggacatgccatcctgtgggggatttccgctgtaaaaatcaccactgcatccctcttcgttggcagtgtgatgggcaaaatgactgtggagataactcagatgaggaaaactgtgctccccgggagtgcacagagagcgagtttcgatgtgtcaatcagcagtgcattccctcgcgatggatctgtgaccattacaacgactgtggggacaactcagatgaacgggactgtgagatgaggacctgccatcctgaatattttcagtgtacaagtggacattgtgtacacagtgaactgaaatgcgatggatccgctgactgtttggatgcgtctgatgaagctgattgtcccacacgctttcctgatggtgcatactgccaggctactatgttcgaatgcaaaaaccatgtttgtatcccgccatattggaaatgtgatggcgatgatgactgtggcgatggttcagatgaagaacttcacctgtgcttggatgttccctgtaattcaccaaaccgtttccggtgtgacaacaatcgctgcatttatagtcatgaggtgtgcaatggtgtggatgactgtggagatggaactgatgagacagaggagcactgtagaaaaccgacccctaaaccttgtacagaatatgaatataagtgtggcaatgggcattgcattccacatgacaatgtgtgtgatgatgccgatgactgtggtgactggtccgatgaactgggttgcaataaaggaaaagaaagaacatgtgctgaaaatatatgcgagcaaaattgtacccaattaaatgaaggaggatttatctgctcctgtacagctgggttcgaaaccaatgtttttgacagaacctcctgtctagatatcaatgaatgtgaacaatttgggacttgtccccagcactgcagaaataccaaaggaagttatgagtgtgtctgtgctgatggcttcacgtctatgagtgaccgccctggaaaacgatgtgcagctgagggtagctctcctttgttgctactgcctgacaatgtccgaattcgaaaatataatctctcatctgagaggttctcagagtatcttcaagatgaggaatatatccaagctgttgattatgattgggatcccraggacataggcctcagtgttgtgtattacactgtgcgaggggagggctctaggtttggtgctatcaaacgtgcctacatccccaactttgaatccggccgcaataatcttgtgcaggaagttgacctgaaactgaaatacgtaatgcagccagatggaatagcagtggactgggttggaaggcatatttactggtcagatgtcaagaataaacgcattgaggtggctaaacttgatggaaggtacagaaagtggctgatttccactgacctggaccaaccagctgctattgctgtgaatcccaaactagggcttatgttctggactgactggggaaaggaacctaaamtcgagtctgcctggatgaatggagaggaccgcaacatcctggttttcgaggaccttggttggccaactggcctttctatcgattatttgaacaatgaccgaatctactggagtgacttcaaggaggacgttattgaaaccataaaatatgatgggactgataggagagtcattgcaaaggaagcaatgaacccttacagcctggacatctttgaagaccagttatactggatatctaaggaaaagggagaagtatggaaacaaaataaatttgggcaaggaaagaaagagaaaacgctggtagtgaacccttggctcactcaagttcgaatctttcatcaactcagatacaataagtcagtgcccaacctttgcaaacagatctgcagccacctctgccttctgagacctggaggatacagctgtgcctgtccccaaggctccagctttatagaggggagcaccactgagtgtgatgcagccatygaactgcctatcaacctgccccccccatgcaggtgcatgcacggaggaaattgctattttgatgagactgacctccccaaatgcaagtgtcctagcggctacaccggaaaatattgtgaaatggcgttttcaaaaggcatctctccaggaacaaccgcagtagctgtgctgttgacaatcctcttgatcgtcgtaattggagctctggcaattgcaggattcttccactatagaaggaccggctcccttttgcctgctctgcccaagctgccaagcttaagcagtctcgtcaagccctctgaaaatgggaatggggtgaccttcagatcaggggcagatcttaacatggatattggagtgtctggttttggacctgagactgctattgacaggtcaatggcaatgagtgaagactttgtcatggaaatggggaagcagcccataatatttgaaaacccaatgtactcagccagagacagtgctgtcaaagtggttcagccaatccaggtgactgtatctgaaaatgtggataataagaattatggaagtcccataaacccttctgagatagttccagagacaaacccaacttcaccagctgctgatggaactcaggtgacaaaatggaatctcttcaaacgaaaatctaaacaaactaccaactttgaaaatccaatctatgcacagatggagaacgagcaaaaggaaagtgttgctgcgacaccacctccatcaccttcgctccctgctaagcctaagcctccttcgagaagagacccaactccaacctattctgcaacagaagacacttttaaagacaccgcaaatcttgttaaagaagactctgaagtatagctatacc

SEQ ID NO: 135 - DNA, 5253 bp, Homo sapiens
  source 1..5253: mol_type = genomic DNA
ttcacctgctccaatgggcgctgcatctcggaagagtggaagtgtgataatgacaacggctgtggggatggcagtgatgagatggaaagtgtctgtgcacttcacacctgctcaccgacagccttcacctgtgccaatgggcgatgtgtccaatactcttaccgctgtgattactacaatgactgtggtgatggcagtgatgagacagggtgcctgttcagggactgcaatgccaccacggagtttatgtgcaataacagaaggtgcatacctcgtgagtttatctgcaatggtgtagacaactgccatgataataacacttcagatgagaaaaattgccctgatcgcacttgccagtctggataccccaaatgtcataattcaaatatttgtattcctcgcgtttatttgtgtgacggagacaatgactgtggagataacagtgatgaaaaccctacttattgcaccactcacacgtgcagcagcagtgagttccaatgcgcatctgggcgctgtattccccaaacatttggtatttgtgatcaagaaacagattgttttgatgcctctgatgaaccctcctcttgtggtcactctgagcgaacatgcctatctgatgagttcaagtgtgatggtgggaggtgcatcccaaacgaatggatctgtgacggtgataatgactgtggggatatgagtgacgaggataaaaggcaccagtgtcagaatcaaaactgctcggattccgagtttccctgtgtaaatgacagacctccggacaggaggtgcattccccagtcttggccccctgatggcgatgtggattgtactgacggccacgatgagattcagaattgcaccaggagaacttgctctgaaaatgaattcacctgtggttacggactgtgtatcccaaagatattcaggtgtgaccggcacaatgactgtggtgactatagcgacgagaggggctgcttataccagacttgccaacagaatcagtttacctgtcagaacgggcgctgcattagtaaaaccttcgtctgtgatgaggataatgactgtggagacggatctgatgagctgatgcacctgtgccacaccccagaacccacgtgtccacctcacgagttcaagtgtgacaatgggcgctgcatcgagatgatgaaactctgcaaccacctagatgactgtttggacaacagcgatgagaaaggctgtggcattaatgaatgccatgacccttcaatcagtggctgcgatcacaactgcacagacaccttaaccagtttctattgttcctgtcgtcctggttacaagctcatgtctgacaagcggacttgtgttgatattgatgaatgcacagagatgccttttgtctgtagccagaagtgtgagaatgtaataggctcctacatctgtaagtgtgccccaggctacctccgagaaccagatggaaagacctgccggcaaaacagtaacatcgaaccctatctcatttttagcaaccgttactatttgcgaaatttaactatagatggctatttttactccctcatcttggaaggactggacaatgttgtggcattagattttgaccgagtagagaagagattgtattggattgatacacagaggcaagtcattgagagaatgtttctgaataagacaaacaaggagacaatcataaaccacagactaccagctgcagaaagtctggctgtagactgggtttccagaaagctctactggttggatgcccgcctggatggcctctttgtctctgacctcaatggtggacaccgccgcatgctggcccagcactgtgtggatgccaacaacaccttctgctttgataatcccagaggacttgcccttcaccctcaatatgggtacctctactgggcagactggggtcaccgcgcatacattgggagagtaggcatggatggaaccaacaagtctgtgataatctccaccaagttagagtggcctaatggcatcaccattgattacaccaatgatctactctactgggcagatgcccacctgggttacatagagtactctgatttggagggccaccatcgacacacggtgtatgatggggcactgcctcaccctttcgctattaccatttttgaagacactatttattggacagattggaatacaaggacagtggaaaagggaaacaaatatgatggatcaaatagacagacactggtgaacacaacccacagaccatttgacatccatgtgtaccatccatataggcagcccattgtgagcaatccctgtggtaccaacaatggtggctgttctcatctctgcctcatcaagccaggaggaaaagggttcacttgcgagtgtccagatgacttccgcacccttcaactgagtggcagcacctactgcatgcccatgtgctccagcacccagttcctgtgcgctaacaatgaaaagtgcattcctatctggtggaaatgtgatggacagaaagactgctcagatggctctgatgaactggccctttgcccgcagcgcttctgccgactgggacagttccagtgcagtgacggcaactgcaccagcccgcagactttatgcaatgctcaccaaaattgccctgatgggtctgatgaagaccgtcttctttgtgagaatcaccactgtgactccaatgaatggcagtgcgccaacaaacgttgcatcccagaatcctggcagtgtgacagttttaacgactgtgaggataactcagatgaagacagttcccactgtgccagcaggacctgccggccgggccagtttcggtgtgctaatggccgctgcatcccgcaggcctggaagtgtgatgtggataatgattgtggagaccactcggatgagcccattgaagaatgcatgagctctgcccatctctgtgacaacttcacagaattcagctgcaaaacaaattaccgctgcatcccaaagtgggccgtgtgcaatggtgtagatgactgcagggacaacagtgatgagcaaggctgtgaggagaggacatgccatcctgtgggggatttccgctgtaaaaatcaccactgcatccctcttcgttggaagtgtgatgggcaaaatgactgtggagataactcagatgaggaaaactgcgctccccgggagtgcacagagagcgagtttcgatgtgtcaatcagcagtgcattccctcgcgatggatctgtgaccattacaacgacttgtggggggacaactcagatgaacgggactgtgagatgaggacctgccatcctgaatattttcagtgtacaagtggacatcgtgtacacagtgaactgaaatgcgatggatccgctgactgtttggatgcgtctgatgaagctgattgtcccacacgctttcctgatggtgcatactgccaggctactatgttcgaatgcaaaaaccatgtttgtatcccgccatattggaaatgtgatggcgatgatgactgtggcgatggttcagatgaagaacttcacctgtgcttggatgttccctgtaattcaccaaaccgtttccggtgtgacaacaatcgctgcatttatagtcatgaggtgtgcaatggtgtggatgactgtggagatggaactgatgagacagaggagcactgtagaaaaccgacccctaaaccttgtacagaatatgaatataagtgtggcaatgggcattgcattccacatgacaatgtgtgtgatgatgccgatgactgtggtgactggtccgatgaactgggttgcaataaaggaaaagaaagaacatgtgctgaaaatatatgcgagcaaaattgtacccaattaaatgaaggaggatttatctgctcctgtacagctgggttcgaaaccaatgtttttgacagaacctcctgtctagatatcaatgaatgtgaacaatttgggacttgtccccagcactgcagaaataccaaaggaagttatgagtgtgtctgtgctgatggcttcacgtctatgagtgaccgccctggaaaacgatgtgcagctgagggtagctctcctttgttgctactgcctgacaatgtccgaattcgaaaatataatctctcatctgagaggttctcagagtatcttcaagatgaggaatatatccaagctgttgattatgattgggatcccgaggacataggcctcagtgttgtgtattacactgtgcgaggggagggctctaggtttggtgctatcaaacgtgcctacatccccaactttgaatccggccgcaataatcttgtgcaggaagttgacctgaaactgaaatacgtaatgcagccagatggaatagcagtggactgggttggaaggcatatttactggtcagatgtcaagaataaacgcattgaggtggctaaacttgatggaaggtacagaaagtggctgatttccactgacctggaccaaccagctgctattgctgtgaatcccaaactagggcttatgttctggactgactggggaaaggaacctaaactcgagtctgcctggatgaatggagaggaccccaacatcctggttttcgaggaccttggttggccaactggcctttctatcgattatttgaacaatgaccgaatctactggagtgacttcaaggaggacgttattgaaaccataaaatatgatgggactgataggagagtcattgcaaaggaagcaatgaacccttacagcctggacatctttgaagaccagttatactggatatctaaggaaaagggagaagtatggaaacaaaataaatttgggcaaggaaagaaagagaaaacgctggtagtgaacccttggctcactcaagttcgaatctttcatcaactcagatacaataagtcagtgcccaacctttgcaaacagatctgcagccacctctgccttctgagacctggaggatacagctgtgcctgtccccaaggctccagctttatagaggggagcaccactgagtgtgatgcagccatcgaactgcctatcaacctgccccccccatgcaggtgcatgcacggaggaaattgctattttgatgagactgacctccccaaatgcaagtgtcctagcggctacaccggaaaatattgtgaaatggcgttttcaaaaggcatctctccaggaacaaccgcagtagctgtgctgttgacaatcctcttgatcgtcgtaattggagctctggcaattgcaggattcttccactatagaaggaccggctcc

SEQ ID NO: 136 - DNA, 804 bp, Homo sapiens
  source 1..804: mol_type = genomic DNA
aaatacgtaatgcagccagatggaatagcagtggactgggttggaaggcatatttactggtcagatgtcaagaataaacgcattgaggtggctaaacttgatggaaggtacagaaagtggctgatttccactgacctggaccaaccagctgctattgctgtgaatcccaaactagggcttatgttctggactgactggggaaaggaacctaaaatcgagtctgcctggatgaatggagaggaccgcaacatcctggttttcgaggaccttggttggccaactggcctttctatcgattatttgaacaatgaccgaatctactggagtgacttcaaggaggacgttattgaaaccataaaatatgatgggactgataggagagtcattgcaaaggaagcaatgaacccttacagcctggacatctttgaagaccagttatactggatatctaaggaaaagggagaagtatggaaacaaaataaatttgggcaaggaaagaaagagaaaacgctggtagtgaacccttggctcactcaagttcgaatctttcatcaactcagatacaataagtcagtgcccaacctttgcaaacagatctgcagccacctctgccttctgagacctggaggatacagctgtgcctgtccccaaggctccagctttatagaggggagcaccactgagtgtgatgcagccatcgaactgcctatcaacctgccccccccatgcaggtgcatgcacggaggaaattgctattttgatgagactgacctccccaaatgcaagtgtcctagcggctacacc

SEQ ID NO: 137 - DNA, 2915 bp, Homo sapiens
  source 1..2915: mol_type = genomic DNA
attttgcctgaagaaaggtgacttctaacaactgtctgtgattctcagaaagctctactggttggatgcccgcctggatggcctctttgtctctgacctcaatggtggacaccgccgcatgctggcccagcactgtgtggatgccaacaacaccttctgctttgataatcccagaggacttgcccttcaccctcaatatgggtacctctactgggcagactggggtcaccgcgcatacattgggagagtaggcatggatggaaccaacaagtctgtgataatctccaccaagttagagtggcctaatggcatcaccattgattacaccaatgatctactctactgggcagatgcccacctgggttacatagagtactctgatttggagggccaccatcgacacacggtgtatgatggggcactgcctcaccctttcgctattaccatttttgaagacactatttattggacagattggaatacaaggacagtggaaaagggaaacaaatatgatggatcaaatagacagacactggtgaacacaacacacagaccatttgacatccatgtgtaccatccatataggcagcccattgtgagcaatccctgtggtaccaacaatggtggctgttctcatctctgcctcatcaagccaggaggaaaagggttcacttgcgagtgtccagatgacttccgcacccttcaactgagtggcagcacctactgcatgcccatgtgctccagcacccagttcctgtgcgctaacaatgaaaagtgcattcctatctggtggaaatgtgatggacagaaagactgctcagatggctctgatgaactggccctttgcccgcagcgcttctgccgactgggacagttccagtgcagtgacggcaactgcaccagcccgcagactttatgcaatgctcaccaaaattgccctgatgggtctgatgaagaccgtcttctttgtgagaatcaccactgtgactccaatgaatggcagtgcgccaacaaacgttgcatcccagaatcctggcagtgtgacacatttaacgactgtgaggataactcagatgaagacagttcccactgtgccagcaggacctgccggccgggccagtttcggtgtgctaatggccgctgcatcccgcaggcctggaagtgtgatgtggataatgattgtggagaccactcggatgagcccattgaagaatgcatgagctctgcccatctctgtgacaacttcacagaattcagctgcaaaacaaattaccgctgcatcccaaagtgggccgtgtgcaatggtgtagatgactgcagggacaacagtgatgagcaaggctgtgaggagaggacatgccatcctgtgggggatttccgctgtaaaaatcaccactgcatccctcttcgttggcagtgtgatgggcaaaatgactgtggagataactcagatgaggaaaactgtgctccccgggagtgcacagagagcgagtttcgatgtgtcaatcagcagtgcattccctcgcgatggatctgtgaccattacaacgactgtggggacaactcagatgaacgggactgtgagatgcgtctgatgaagctgattgtcccacacgctttcctgatggtgcatactgccaggctactatgttcgaatgcaaaaaccatgtttgtatcccgccatattggaaatgtgatggcgatgatgactgtggcgatggttcagatgaagaacttcacctgtgcttggatgttccctgtaattcaccaaaccgtttccggtgtgacaacaatcgctgcatttatagtcatgaggtgtgcaatggtgtggatgactgtggagatggaactgatgagacagaggagcactgtagaaaaccgacccctaaaccttgtacagaatatgaatataagtgtggcaatgggcattgcattccacatgacaatgtgtgtgatgatgccgatgactgtggtgactggtccgatgaactgggttgcaataaaggaaaagaaagaacatgtgctgaaaatatatgcgagcaaaattgtacccaattaaatgaaggaggatttatctgctcctgtacagctgggttcgaaaccaatgtttttgacagaacctcctgtctagatatcaatgaatgtgaacaatttgggacttgtccccagcactgcagaaataccaaaggaagttatgagtgtgtctgtgctgatggcttcacgtctatgagtgaccgccctggaaaacgatgtgcagctgagggtagctctcctttgttgctactgcctgacaatgtccgaattcgaaaatataatctctcatctgagaggttctcagagtatcttcaagatgaggaatatatccaagctgttgattatgattgggatcccgaggacataggcctcagtgttgtgtattacactgtgcgaggggagggctctaggtttggtgctatcaaacgtgcctacatccccaactttgaatccggccgcaataatcttgtgcaggaagttgacctgaaactgaaatacgtaatgcagccagatggaatagcagtggactgggttggaaggcatatttactggtcagatgtcaagaataaacgcattgaggtggctaaacttgatggaaggtacagaaagtggctgatttccactgacctggaccaaccagctgctattgctgtgaatcccaaactagggcttatgttctggactgactggggaaaggaacctaaactcgagtctgcctggatgaatggagaggaccgcaacatcctggttttcgaggaccttggttggccaactggcctttctatcgattatttgaacaatgaccgaatctactggagtgacttcaaggaggacgttattgaaaccataaaatatgatgggactgataggagagtcattgc

SEQ ID NO: 138 - DNA, 15808 bp, Homo sapiens
  source 1..15808: mol_type = genomic DNA
aaagtgcagggggcgggccgggcggcagggggcctgcccgctggattcccgcatgcttgttccggggcggtcgggtctaaagggctttatgcactgtctggagggtggggactggcgcgggtagaaaacgggatgcctcgggcgtgggggcaggcttttggccactaggagctggcggaggtgcagacctaaaggagcgttcgctagcagaggcgctgccggtgcggtgtgctacgcgcgcccacctcccggggaaggaacggcgaggccggggaccgtcgcggagatggatcgcgggccggcagcagtggcgtgcacgctgctcctggctctcgtcgcctgcctagcgccggccagtggccaagaatgtgacagtgcgcattttcgctgtggaagtgggcattgcatccctgcagactggaggtgtgatgggaccaaagactgttcagatgacgcggatgaaattggctgcgctgttgtgacctgccagcagggctatttcaagtgccagagtgagggacaatgcatccccaactcctgggtgtgtgaccaagatcaagactgtgatgatggctcagatgaacgtcaagattgctcacaaagtacatgctcaagtcatcagataacatgctccaatggtcagtgtatcccaagtgaatacaggtgcgaccacgtcagagactgccccgatggagctgatgagaatgactgccagtacccaacatgtgagcagcttacttgtgacaatggggcctgctataacaccagtcagaagtgtgattggaaagttgattgcagggactcctcagatgaaatcaactgcactgagatatgcttgcacaatgagttttcatgtggcaatggagagtgtatccctcgtgcttatgtctgtgaccatgacaatgattgccaagacggcagtgacgaacatgcttgcaactatccgacctgcggtggttaccagttcacttgccccagtggccgatgcatttatcaaaactgggtttgtgatggagaagatgactgtaaagataatggagatgaagatggatgtgaaagcggtcctcatgatgttcataaatgttccccaagagaatggtcttgcccagagtcgggacgatgcatctccatttataaagtttgtgatgggattttagattgcccaggaagagaagatgaaaacaacactagtaccggaaaatactgtagtatgactctgtgctctgccttgaactgccagtaccagtgccatgagacgccgtatggaggagcgtgtttttgtcccccaggttatatcatcaaccacaatgacagccgtacctgtgttgagtttgatgattgccagatatggggaatttgtgaccagaagtgtgaaagccgacctggccgtcacctgtgccactgtgaagaagggtatatcttggagcgtggacagtattgcaaagctaatgattcctttggcgaggcctccattatcttctccaatggtcgggatttgttaattggtgatattcatggaaggagcttccggatcctagtggagtctcagaatcgtggagtggccgtgggtgtggctttccactatcacctgcaaagagttttttggacagacaccgtgcaaaataaggttttttcagttgacattaatggtttaaatatccaagaggttctcaatgtttctgttgaaaccccagagaacctggctgtggactgggttaataataaaatctatctagtggaaaccaaggtcaaccgcatagatatggtaaatttggatggaagctatcgggttacccttataactgaaaacttggggcatcctagaggaattgccgtggacccaactgttggttatttatttttctcagattgggagagcctttctggggaacctaagctggaaagggcattcatggatggcagcaaccgtaaagacttggtgaaaacaaagctgggatggcctgctggggtaactctggatatgatatcgaagcgtgtttactgggttgactctcggtttgattacattgaaactgtaacttatgatggaattcaaaggaagactgtagttcatggaggctccctcattcctcatccctttggagtaagcttatttgaaggtcaggtgttctttacagattggacaaagatggccgtgctgaaggcaaacaagttcacagagaccaacccacaagtgtactaccaggcttccctgaggccctatggagtgactgtttaccattccctcagacagccctatgctaccaatccgtgtaaagataacaatgggggctgtgagcaggtctgtgtcctcagccacagaacagataatgatggtttgggtttccgttgcaagtgcacattcggcttccaactggatacagatgagcgccactgcattgctgttcagaatttcctcattttttcatcccaagttgctattcgtgggatcccgttcaccttgtctacccaggaagatgtcatggttccagtttcggggaatccttctttctttgtcgggattgattttgacgcccaggacagcactatctttttttcagatatgtcaaaacacatgatttttaagcaaaagattgatggcacaggaagagaaattctcgcagctaacagggtggaaaatgttgaaagtttggcttttgattggatttcaaagaatctctattggacagactctcattacaagagtatcagtgtcatgaggctagctgataaaacgagacgcacagtagttcagtatttaaataacccacggtcggtggtagttcatccttttgccgggtatctattcttcactgattggttccgtcctgctaaaattatgagagcatggagtgacggatctcacctcttgcctgtaataaacactactcttggatggcccaatggcttggccatcgattgggctgcttcacgattgtactgggtagatgcctattttgataaaattgagcacagcacctttgatggtttagacagaagaagactgggccatatagagcagatgacacatccgtttggacttgccatctttggagagcatttattttttactgactggagactgggtgccattattcgagtcaggaaagcagatggtggagaaatgacagttatccgaagtggcattgcttacatactgcatttgaaatcgtatgatgtcaacatccagactggttctaacgcctgtaatcaacccacgcatcctaacggtgactgcagccacttctgcttcccggtgccaaatttccagcgagtgtgtgggtgcccttatggaatgaggctggcttccaatcacttgacatgcgagggggacccaaccaatgaaccacccacagagcagtgtggcttattttccttcccctgtaaaaatggcagatgtgtgcccaattactatctctgtgatggagtcgatgattgtcatgataacagtgatgagcaactatgtggcacacttaataatacctgttcatcttcggcgttcacctgtggccatggggagtgcattcctgcacactggcgctgtgacaaacgcaacgactgtgtggatggcagtgatgagcacaactgccccacccacgcacctgcttcctgccttgacacccaatacacctgtgataatcaccagtgtatctcaaagaactgggtctgtgacacagacaatgattgtggggatggatctgatgaaaagaactgcaattcgacagagacatgccaacctagtcagtttaattgccccaatcatcgatgtattgacctatcgtttgtctgtgatggtgacaaggattgtgttgatggatctgatgaggttggttgtgtattaaactgtactgcttctcaattcaagtgtgccagtggggataaatgtattggcgtcacaaatcgttgtgatggtgtttttgattgcagtgacaactcggatgaagcaggctgtccaaccaggcctcctggtatgtgccactcagatgaatttcagtgccaagaagatggtatctgcatcccgaacttctgggaatgtgatgggcatccagactgcctctatggatctgatgagcacaatgcctgtgtccccaagacttgcccttcatcatatttccactgtgacaacggaaactgcatccacagggcatggctctgtgatcgggacaatgactgcggggatatgagtgatgagaaggactgccctactcagccctttcgctgtcctagttggcaatggcagtgtcttggccataacatctgtgtgaatctgagtgtagtgtgtgatggcatctttgactgccccaatgggacagatgagtccccactttgcaatgggaacagctgctcagatttcaatggtggttgtactcacgagtgtgttcaagagccctttggggctaaatgcctatgtccattgggattcttacttgccaatgattctaagacctgtgaagacatagatgaatgtgatattctaggctcttgtagccagcactgttacaatatgagaggttctttccggtgctcgtgtgatacaggctacatgttagaaagtgatgggaggacttgcaaagttacagcatctgagagtctgctgttacttgtggcaagtcagaacaaaattattgccgacagtgtcacctcccaggtccacaatatctattcattggtcgagaatggttcttacattgtagctgttgattttgattcaattagtggtcgtatcttttggtctgatgcaactcagggtaaaacctggagtgcgtttcaaaatggaacggacagaagagtggtatttgacagtagcatcatcttgactgaaactattgcaatagattgggtaggtcgtaatctttactggacagactatgctctggaaacaattgaagtctccaaaattgatgggagccacaggactgtgctgattagtaaaaacctaacaaatccaagaggactagcattagatcccagaatgaatgagcatctactgttctggtctgactggggccaccaccctcgcatcgagcgagccagcatggacggcagcatgcgcactgtcattgtccaggacaagatcttctggccctgcggcttaactattgactaccccaacagactgctctacttcatggactcctatcttgattacatggacttttgtgattataatggacaccatcggagacaggtgatagccagtgatttgattatacggcacccctatgccctaactctctttgaagactctgtgtactggactgaccgtgctactcgtcgggttatgcgagccaacaagtggcatggagggaaccagtcagttgtaatgtataatattcaatggccccttgggattgttgcggttcatccttcgaaacaaccaaattccgtgaatccatgtgccttttcccgctgcagccatctctgcctgctttcctcacaggggcctcatttttactcctgtgtttgtccttcaggatggagtctgtctcctgatctcctgaattgcttgagagatgatcaacctttcttaataactgtaaggcaacatataatttttggaatctcccttaatcctgaggtgaagagcaatgatgctatggtccccatagcagggatacagaatggtttagatgttgaatttgatgatgctgagcaatacatctattgggttgaaaatccaggtgaaattcacagagtgaagacagatggcaccaacaggacagtatttgcttctatatctatggtggggccttctatgaacctggccttagattggatttcaagaaacctttattctaccaatcctagaactcagtcaatcgaggttttgacactccacggagatatcagatacagaaaaacattgattgccaatgatgggacagctcttggagttggctttccaattggcataactgttgatcctgctcgtgggaagctgtactggtcagaccaaggaactgacagtggggttcctgccaagatcgccagtgctaacatggatggcacatctgtgaaaactctctttactgggaacctcgaacacctggagtgtgtcactcttgacatcgaagagcagaaactctactgggcagtcactggaagaggagtgattgaaagaggaaacgtggatggaacagatcgaatgatcctggtacaccagctttcccacccctggggaattgcagtccatgattctttcctttattatactgatgaacagtatgaggtcattgaaagagttgataaggccactggggccaacaaaatagtcttgagagataatgttccaaatctgaggggtcttcaagtttatcacagacgcaatgccgccgaatcctcaaatggctgtagcaacaacatgaatgcctgtcagcagatttgcctgcctgtaccaggaggattgttttcctgcgcctgtgccactggatttaaactcaatcctgataatcggtcctgctctccatataactctttcattgttgtttcaatgctgtctgcaatcagaggctttagcttggaattgtcagatcattcagaaaccatggtgccggtggcaggccaaggacgaaacgcactgcatgtggatgtggatgtgtcctctggctttatttattggtgtgattttagcagctcagtggcatctgataatgcgatccgtagaattaaaccagatggatcttctctgatgaacattgtgacacatggaataggagaaaatggagtccggggtattgcagtggattgggtagcaggaaatctttatttcaccaatgcctttgtttctgaaacactgatagaagttctgcggatcaatactacttaccgccgtgttcttcttaaagtcacagtggacatgcctaggcatattgttgtagatcccaagaacagatacctcttctgggctgactatgggcagagaccaaagattgagcgttctttccttgactgtaccaatcgaacagtgcttgtgtcagagggcattgtcacaccacggggcttggcagtggaccgaagtgatggctacgtttattgggttgatgattctttagatataattgcaaggattcgtatcaatggagagaactctgaagtgattcgttatggcagtcgttacccaactccttatggcatcactgtttttgaaaattctatcatatgggtagataggaatttgaaaaagatcttccaagccagcaaggaaccagagaacacagagccacccacagtgataagagacaatatcaactggctaagagatgtgaccatctttgacaagcaagtccagccccggtcaccagcagaggtcaacaacaacccttgcttggaaaacaatggtgggtgctctcatctctgctttgctctgcctggattgcacaccccaaaatgtgactgtgcctttgggaccctgcaaagtgatggcaagaattgtgccatttcaacagaaaatttcctcatctttgccttgtctaattccttgagaagcttacacttggaccctgaaaaccatagcccacctttccaaacaataaatgtggaaagaactgtcatgtctctagactatgacagtgtaagtgatagaatctacttcacacaaaatttagcctctggagttggacagatttcctatgccaccctgtcttcagggatccatactccaactgtcattgcttcaggtatagggactgctgatggcattgcctttgactggattactagaagaatttattacagtgactacctcaaccagatgattaattccatggctgaagatgggtctaaccgcactgtgatagcccgcgttccaaaaccaagagcaattgtgttagatccctgccaagggtacctgtactgggctgactgggatacacatgccaaaatcgagagagccacattgggaggaaacttccgcgtacccattgtgaacagcagtctggtcatgcccagtgggctgactctggactatgaagaggaccttctctactgggtggatgctagtctgcagaggattgaacgcagcactctgacgggcgtggatcgtgaagtcattgtcaatgcagccgttcatgcttttggcttgactctctatggccagtatatttactggactgacttgtacacacaaagaatttaccgagctaacaaatatgacgggtcaggtcagattgcaatgaccacaaatttgctctcccagcccaggggaatcaacactgttgtgaagaaccagaaacaacagtgtaacaatccttgtgaacagtttaatgggggctgcagccatatctgtgcaccaggtccaaatggtgccgagtgccagtgtccacatgagggcaactggtatttggccaacaacaggaagcactgcattgtggacaatggtgaacgatgtggtgcatcttccttcacctgctccaatgggcgctgcatctcggaagagtggaagtgtgataatgacaacgactgtggggatggcagtgatgagatggaaagtgtctgtgcacttcacacctgctcaccgacagccttcacctgtgccaatgggcgatgtgtccaatactcttaccgctgtgattactacaatgactgtggtgatggcagtgatgaggcagggtgcctgttcagggactgcaatgccaccacggagtttatgtgcaataacagaaggtgcatacctcgtgagtttatctgcaatggtgtagacaactgccatgataataacacttcagatgagaaaaattgccctgatcgcacttgccagtctggatacacaaaatgtcataattcaaatatttgtattcctcgcgtttatttgtgtgacggagacaatgactgtggagataacagtgatgaaaaccctacttattgcaccactcacacgtgcagcagcagtgagttccaatgcgcatctgggcgctgtattcctcaacattggtattgtgatcaagaaacagattgttttgatgcctctgatgaacctgcctcttgtggtcactctgagcgaacatgcctagctgatgagttcaagtgtgatggtgggaggtgcatcccaagcgaatggatctgtgacggtgataatgactgtggggatatgagtgacgaggataaaaggcaccagtgtcagaatcaaaactgctcggattccgagtttctctgtgtaaatgacagacctccggacaggaggtgcattccccagtcttgggtctgtgatggcgatgtggattgtactgacggctacgatgagaatcagaattgcaccaggagaacttgctctgaaaatgaattcacctgtggttacggactgtgtatcccaaagatattcaggtgtgaccggcacaatgactgtggtgactatagcgacgagaggggctgcttataccagacttgccaacagaatcagtttacctgtcagaacgggcgctgcattagtaaaaccttcgtctgtgatgaggataatgactgtggagacggatctgatgagctgatgcacctgtgccacaccccagaacccacgtgtccacctcacgagttcaagtgtgacaatgggcgctgcatcgagatgatgaaactctgcaaccacctagatgactgtttggacaacagcgatgagaaaggctgtggcattaatgaatgccatgacccttcaatcagtggctgcgatcacaactgcacagacaccttaaccagtttctattgttcctgtcgtcctggttacaagctcatgtctgacaagcggacttgtgttgatattgatgaatgcacagagatgccttttgtctgtagccagaagtgtgagaatgtaataggctcctacatctgtaagtgtgccccaggctacctccgagaaccagatggaaagacctgccggcaaaacagtaacatcgaaccctatctcatttttagcaaccgttactatttgagaaatttaactatagatggctatttttactccctcatcttggaaggactggacaatgttgtggcattagattttgaccgagtagagaagagattgtattggattgatacacagaggcaagtcattgagagaatgtttctgaataagacaaacaaggagacaatcataaaccacagactaccagctgcagaaagtctggctgtagactgggtttccagaaagctctactggttggatgcccgcctggatggcctctttgtctctgacctcaatggtggacaccgccgcatgctggcccagcactgtgtggatgccaacaacaccttctgctttgataatcccagaggacttgcccttcaccctcaatatgggtacctctactgggcagactggggtcaccgcgcatacattgggagagtaggcatggatggaaccaacaagtctgtgataatctccaccaagttagagtggcctaatggcatcaccattgattacaccaatgatctactctactgggcagatgcccacctgggttacatagagtactctgatttggagggccaccatcgacacacggtgtatgatggggcactgcctcaccctttcgctattaccatttttgaagacactatttattggacagattggaatacaaggacagtggaaaagggaaacaaatatgatggatcaaatagacagacactggtgaacacaacacacagaccatttgacatccatgtgtaccatccatataggcagcccattgtgagcaatccctgtggtaccaacaatggtggctgttctcatctctgcctcatcaagccaggaggaaaagggttcacttgcgagtgtccagatgacttccgcacccttcagctgagtggcagcacctactgcatgcccatgtgctccagcacccagttcctgtgcgctaacaatgaaaagtgcattcctatctggtggaaatgtgatggacagaaagactgctcagatggctctgatgaactggccctttgcccgcagcgcttctgccgactgggacagttccagtgcagtgacggcaactgcaccagcccgcagactttatgcaatgctcaccaaaattgccctgatgggtctgatgaagaccgtcttctttgtgagaatcaccactgtgactccaatgaatggcagtgcgccaacaaacgttgcatcccagaatcctggcagtgtgacacatttaacgactgtgaggataactcagatgaagacagttcccactgtgccagcaggacctgccggccgggccagtttcggtgtgctaatggccgctgcatcccgcaggcctggaagtgtgatgtggataatgattgtggagaccactcggatgagcccattgaagaatgcatgagctctgcccatctctgtgacaacttcacagaattcagctgcaaaacaaattaccgctgcatcccaaagtgggccgtgtgcaatggtgtagatgactgcagggacaacagtgatgagcaaggctgtgaggagaggacatgccatcctgtgggggatttccgctgtaaaaatcaccactgcatccctcttcgttggcagtgtgatgggcaaaatgactgtggagataactcagatgaggaaaactgtgctccccgggagtgcacagagagcgagtttcgatgtgtcaatcagcagtgcattccctcgcgatggatctgtgaccattacaacgactgtggggacaactcagatgaacgggactgtgagatgaggacctgccatcctgaatattttcagtgtacaagtggacattgtgtacacagtgaactgaaatgcgatggatccgctgactgtttggatgcgtctgatgaagctgattgtcccacacgctttcctgatggtgcatactgccaggctactatgttcgaatgcaaaaaccatgtttgtatcccgccatattggaaatgtgatggcgatgatgactgtggcgatggttcagatgaagaacttcacctgtgcttggatgttccctgtaattcaccaaaccgtttccggtgtgacaacaatcgctgcatttatagtcatgaggtgtgcaatggtgtggatgactgtggagatggaactgatgagacagaggagcactgtagaaaaccgacccctaaaccttgtacagaatatgaatataagtgtggcaatgggcattgcattccacatgacaatgtgtgtgatgatgccgatgactgtggtgactggtccgatgaactgggttgcaataaaggaaaagaaagaacatgtgctgaaaatatatgcgagcaaaattgtacccaattaaatgaaggaggatttatctgctcctgtacagctgggttcgaaaccaatgtttttgacagaacctcctgtctagatatcaatgaatgtgaacaatttgggacttgtccccagcactgcagaaataccaaaggaagttatgagtgtgtctgtgctgatggcttcacgtctatgagtgaccgccctggaaaacgatgtgcagctgagggtagctctcctttgttgctactgcctgacaatgtccgaattcgaaaatataatctctcatctgagaggttctcagagtatcttcaagatgaggaatatatccaagctgttgattatgattgggatcccaaggacataggcctcagtgttgtgtattacactgtgcgaggggagggctctaggtttggtgctatcaaacgtgcctacatccccaactttgaatccggccgcaataatcttgtgcaggaagttgacctgaaactgaaatacgtaatgcagccagatggaatagcagtggactgggttggaaggcatatttactggtcagatgtcaagaataaacgcattgaggtggctaaacttgatggaaggtacagaaagtggctgatttccactgacctggaccaaccagctgctattgctgtgaatcccaaactagggcttatgttctggactgactggggaaaggaacctaaaatcgagtctgcctggatgaatggagaggaccgcaacatcctggttttcgaggaccttggttggccaactggcctttctatcgattatttgaacaatgaccgaatctactggagtgacttcaaggaggacgttattgaaaccataaaatatgatgggactgataggagagtcattgcaaaggaagcaatgaacccttacagcctggacatctttgaagaccagttatactggatatctaaggaaaagggagaagtatggaaacaaaataaatttgggcaaggaaagaaagagaaaacgctggtagtgaacccttggctcactcaagttcgaatctttcatcaactcagatacaataagtcagtgcccaacctttgcaaacagatctgcagccacctctgccttctgagacctggaggatacagctgtgcctgtccccaaggctccagctttatagaggggagcaccactgagtgtgatgcagccatcgaactgcctatcaacctgccccccccatgcaggtgcatgcacggaggaaattgctattttgatgagactgacctccccaaatgcaagtgtcctagcggctacaccggaaaatattgtgaaatggcgttttcaaaaggcatctctccaggaacaaccgcagtagctgtgctgttgacaatcctcttgatcgtcgtaattggagctctggcaattgcaggattcttccactatagaaggaccggctcccttttgcctgctctgcccaagctgccaagcttaagcagtctcgtcaagccctctgaaaatgggaatggggtgaccttcagatcaggggcagatcttaacatggatattggagtgtctggttttggacctgagactgctattgacaggtcaatggcaatgagtgaagactttgtcatggaaatggggaagcagcccataatatttgaaaacccaatgtactcagccagagacagtgctgtcaaagtggttcagccaatccaggtgactgtatctgaaaatgtggataataagaattatggaagtcccataaacccttctgagatagttccagagacaaacccaacttcaccagctgctgatggaactcaggtgacaaaatggaatctcttcaaacgaaaatctaaacaaactaccaactttgaaaatccaatctatgcacagatggagaacgagcaaaaggaaagtgttgctgcgacaccacctccatcaccttcgctccctgctaagcctaagcctccttcgagaagagacccaactccaacctattctgcaacagaagacacttttaaagacaccgcaaatcttgttaaagaagactctgaagtatagctataccagctatttagggaataattagaaacacacttttgcacatatattttttacaaacagatgaaaaaagttaacattcagtactttatgaaaaaaatatatttttccctgtttgcctatagttggaggtatcctgtgtgtctttttttacttatgccgtctcatatttttacaaataattatcacaatgtactatatgtatatctttgcactgaagttgtctgaaggtaatactataaatatattgtatatttgtaaattttggaaagattatcctgttactgaatttgctaataaagatgtctgctgatttggttggtgatcattatagtaaatgatccaacaagaaaaggaattgactggggacctttagccgtgtctaaagaagaggcaccactcatatttcctataaaattatctaggaaaggaatccaggccccgctcttgggtccatttttacacattagcacttaattaatgttcaatattacatgtcaatttgattaatggctatgttgataggggccactatgtgttgtatagacatctggacttgactgtagactcctcagataatacagaaggtaggaaaagcaattcagtttggcccttctgtgtgttggcattgtctaaccagaactctctgtttcatgtgtgttctctcactagctgccaagacaacatttttatttgtgatgtctatgaggaaatcccatatcattaagtgccagtgtcctgcattgagtttgtggttaattaaatgagctcttctgctgatggaccctggagcaatttctcccctcacctgacattcaaggtggtcacctgccctagtagttggagctcagtagctgaatttctgaaaccaaatctgtgtcttcataaaataaggtgcaaaaaaaaaaaataccagttaagtaaagcctcaactgggtttttgtttctatgaaaatatcattataatcactatttatttcctaagttgaacctgaatagaaagggaaaccattcttattaagctttttattaggccctgtggctaaatgtgtacatttatattagaatgtactgtacagtccagatcttttctttaattcttattggttttttttttttttttttttttagagatggagtcttgctatattgccaaggctgatcttgaagtcctgggctcaagtgatcctcccacctcagcctcctgagtggttggggttacgggcgtgagccactgtgcctggcttccagctctcctcttaaatagtgggtatagtctgcacaacaggaaccatggcaggaatatacactttcccatagcaaatagcatacctgactctctgtgctaatattgcacatttgttaaacaatgaatgaatggatggatggatggatggatgaatgaatgaaacatatactactgattattttattccagagttctcaaaatatttgttgctgatattttgagtgctgactgtaattactttgattagataaacaactggaaataatgctgctgaaaaagttctaataaatgtgtattttatcaga

SEQ ID NO: 139 - protein, 4655 aa, Homo sapiens
MDRGPAAVACTLLLALVACLAPASGQECDSAHFRCGSGHCIPADWRCDGTKDCSDDADEIGCAVVTCQQGYFKCQSEGQCIPNSWVCDQDQDCDDGSDERQDCSQSTCSSHQITCSNGQCIPSEYRCDHVRDCPDGADENDCQYPTCEQLTCDNGACYNTSQKCDWKVDCRDSSDEINCTEICLHNEFSCGNGECIPRAYVCDHDNDCQDGSDEHACNYPTCGGYQFTCPSGRCIYQNWVCDGEDDCKDNGDEDGCESGPHDVHKCSPREWSCPESGRCISIYKVCDGILDCPGREDENNTSTGKYCSMTLCSALNCQYQCHETPYGGACFCPPGYIINHNDSRTCVEFDDCQIWGICDQKCESRPGRHLCHCEEGYILERGQYCKANDSFGEASIIFSNGRDLLIGDIHGRSFRILVESQNRGVAVGVAFHYHLQRVFWTDTVQNKVFSVDINGLNIQEVLNVSVETPENLAVDWVNNKIYLVETKVNRIDMVNLDGSYRVTLITENLGHPRGIAVDPTVGYLFFSDWESLSGEPKLERAFMDGSNRKDLVKTKLGWPAGVTLDMISKRVYWVDSRFDYIETVTYDGIQRKTVVHGGSLIPHPFGVSLFEGQVFFTDWTKMAVLKANKFTETNPQVYYQASLRPYGVTVYHSLRQPYATNPCKDNNGGCEQVCVLSHRTDNDGLGFRCKCTFGFQLDTDERHCIAVQNFLIFSSQVAIRGIPFTLSTQEDVMVPVSGNPSFFVGIDFDAQDSTIFFSDMSKHMIFKQKIDGTGREILAANRVENVESLAFDWISKNLYWTDSHYKSISVMRLADKTRRTVVQYLNNPRSVVVHPFAGYLFFTDWFRPAKIMRAWSDGSHLLPVINTTLGWPNGLAIDWAASRLYWVDAYFDKIEHSTFDGLDRRRLGHIEQMTHPFGLAIFGEHLFFTDWRLGAIIRVRKADGGEMTVIRSGIAYILHLKSYDVNIQTGSNACNQPTHPNGDCSHFCFPVPNFQRVCGCPYGMRLASNHLTCEGDPTNEPPTEQCGLFSFPCKNGRCVPNYYLCDGVDDCHDNSDEQLCGTLNNTCSSSAFTCGHGECIPAHWRCDKRNDCVDGSDEHNCPTHAPASCLDTQYTCDNHQCISKNWVCDTDNDCGDGSDEKNCNSTETCQPSQFNCPNHRCIDLSFVCDGDKDCVDGSDEVGCVLNCTASQFKCASGDKCIGVTNRCDGVFDCSDNSDEAGCPTRPPGMCHSDEFQCQEDGICIPNFWECDGHPDCLYGSDEHNACVPKTCPSSYFHCDNGNCIHRAWLCDRDNDCGDMSDEKDCPTQPFRCPSWQWQCLGHNICVNLSVVCDGIFDCPNGTDESPLCNGNSCSDFNGGCTHECVQEPFGAKCLCPLGFLLANDSKTCEDIDECDILGSCSQHCYNMRGSFRCSCDTGYMLESDGRTCKVTASESLLLLVASQNKIIADSVTSQVHNIYSLVENGSYIVAVDFDSISGRIFWSDATQGKTWSAFQNGTDRRVVFDSSIILTETIAIDWVGRNLYWTDYALETIEVSKIDGSHRTVLISKNLTNPRGLALDPRMNEHLLFWSDWGHHPRIERASMDGSMRTVIVQDKIFWPCGLTIDYPNRLLYFMDSYLDYMDFCDYNGHHRRQVIASDLIIRHPYALTLFEDSVYWTDRATRRVMRANKWHGGNQSVVMYNIQWPLGIVAVHPSKQPNSVNPCAFSRCSHLCLLSSQGPHFYSCVCPSGWSLSPDLLNCLRDDQPFLITVRQHIIFGISLNPEVKSNDAMVPIAGIQNGLDVEFDDAEQYIYWVENPGEIHRVKTDGTNRTVFASISMVGPSMNLALDWISRNLYSTNPRTQSIEVLTLHGDIRYRKTLIANDGTALGVGFPIGITVDPARGKLYWSDQGTDSGVPAKIASANMDGTSVKTLFTGNLEHLECVTLDIEEQKLYWAVTGRGVIERGNVDGTDRMILVHQLSHPWGIAVHDSFLYYTDEQYEVIERVDKATGANKIVLRDNVPNLRGLQVYHRRNAAESSNGCSNNMNACQQICLPVPGGLFSCACATGFKLNPDNRSCSPYNSFIVVSMLSAIRGFSLELSDHSETMVPVAGQGRNALHVDVDVSSGFIYWCDFSSSVASDNAIRRIKPDGSSLMNIVTHGIGENGVRGIAVDWVAGNLYFTNAFVSETLIEVLRINTTYRRVLLKVTVDMPRHIVVDPKNRYLFWADYGQRPKIERSFLDCTNRTVLVSEGIVTPRGLAVDRSDGYVYWVDDSLDIIARIRINGENSEVIRYGSRYPTPYGITVFENSIIWVDRNLKKIFQASKEPENTEPPTVIRDNINWLRDVTIFDKQVQPRSPAEVNNNPCLENNGGCSHLCFALPGLHTPKCDCAFGTLQSDGKNCAISTENFLIFALSNSLRSLHLDPENHSPPFQTINVERTVMSLDYDSVSDRIYFTQNLASGVGQISYATLSSGIHTPTVIASGIGTADGIAFDWITRRIYYSDYLNQMINSMAEDGSNRTVIARVPKPRAIVLDPCQGYLYWADWDTHAKIERATLGGNFRVPIVNSSLVMPSGLTLDYEEDLLYWVDASLQRIERSTLTGVDREVIVNAAVHAFGLTLYGQYIYWTDLYTQRIYRANKYDGSGQIAMTTNLLSQPRGINTVVKNQKQQCNNPCEQFNGGCSHICAPGPNGAECQCPHEGNWYLANNRKHCIVDNGERCGASSFTCSNGRCISEEWKCDNDNDCGDGSDEMESVCALHTCSPTAFTCANGRCVQYSYRCDYYNDCGDGSDEAGCLFRDCNATTEFMCNNRRCIPREFICNGVDNCHDNNTSDEKNCPDRTCQSGYTKCHNSNICIPRVYLCDGDNDCGDNSDENPTYCTTHTCSSSEFQCASGRCIPQHWYCDQETDCFDASDEPASCGHSERTCLADEFKCDGGRCIPSEWICDGDNDCGDMSDEDKRHQCQNQNCSDSEFLCVNDRPPDRRCIPQSWVCDGDVDCTDGYDENQNCTRRTCSENEFTCGYGLCIPKIFRCDRHNDCGDYSDERGCLYQTCQQNQFTCQNGRCISKTFVCDEDNDCGDGSDELMHLCHTPEPTCPPHEFKCDNGRCIEMMKLCNHLDDCLDNSDEKGCGINECHDPSISGCDHNCTDTLTSFYCSCRPGYKLMSDKRTCVDIDECTEMPFVCSQKCENVIGSYICKCAPGYLREPDGKTCRQNSNIEPYLIFSNRYYLRNLTIDGYFYSLILEGLDNVVALDFDRVEKRLYWIDTQRQVIERMFLNKTNKETIINHRLPAAESLAVDWVSRKLYWLDARLDGLFVSDLNGGHRRMLAQHCVDANNTFCFDNPRGLALHPQYGYLYWADWGHRAYIGRVGMDGTNKSVIISTKLEWPNGITIDYTNDLLYWADAHLGYIEYSDLEGHHRHTVYDGALPHPFAITIFEDTIYWTDWNTRTVEKGNKYDGSNRQTLVNTTHRPFDIHVYHPYRQPIVSNPCGTNNGGCSHLCLIKPGGKGFTCECPDDFRTLQLSGSTYCMPMCSSTQFLCANNEKCIPIWWKCDGQKDCSDGSDELALCPQRFCRLGQFQCSDGNCTSPQTLCNAHQNCPDGSDEDRLLCENHHCDSNEWQCANKRCIPESWQCDTFNDCEDNSDEDSSHCASRTCRPGQFRCANGRCIPQAWKCDVDNDCGDHSDEPIEECMSSAHLCDNFTEFSCKTNYRCIPKWAVCNGVDDCRDNSDEQGCEERTCHPVGDFRCKNHHCIPLRWQCDGQNDCGDNSDEENCAPRECTESEFRCVNQQCIPSRWICDHYNDCGDNSDERDCEMRTCHPEYFQCTSGHCVHSELKCDGSADCLDASDEADCPTRFPDGAYCQATMFECKNHVCIPPYWKCDGDDDCGDGSDEELHLCLDVPCNSPNRFRCDNNRCIYSHEVCNGVDDCGDGTDETEEHCRKPTPKPCTEYEYKCGNGHCIPHDNVCDDADDCGDWSDELGCNKGKERTCAENICEQNCTQLNEGGFICSCTAGFETNVFDRTSCLDINECEQFGTCPQHCRNTKGSYECVCADGFTSMSDRPGKRCAAEGSSPLLLLPDNVRIRKYNLSSERFSEYLQDEEYIQAVDYDWDPKDIGLSVVYYTVRGEGSRFGAIKRAYIPNFESGRNNLVQEVDLKLKYVMQPDGIAVDWVGRHIYWSDVKNKRIEVAKLDGRYRKWLISTDLDQPAAIAVNPKLGLMFWTDWGKEPKIESAWMNGEDRNILVFEDLGWPTGLSIDYLNNDRIYWSDFKEDVIETIKYDGTDRRVIAKEAMNPYSLDIFEDQLYWISKEKGEVWKQNKFGQGKKEKTLVVNPWLTQVRIFHQLRYNKSVPNLCKQICSHLCLLRPGGYSCACPQGSSFIEGSTTECDAAIELPINLPPPCRCMHGGNCYFDETDLPKCKCPSGYTGKYCEMAFSKGISPGTTAVAVLLTILLIVVIGALAIAGFFHYRRTGSLLPALPKLPSLSSLVKPSENGNGVTFRSGADLNMDIGVSGFGPETAIDRSMAMSEDFVMEMGKQPIIFENPMYSARDSAVKVVQPIQVTVSENVDNKNYGSPINPSEIVPETNPTSPAADGTQVTKWNLFKRKSKQTTNFENPIYAQMENEQKESVAATPPPSPSLPAKPKPPSRRDPTPTYSATEDTFKDTANLVKEDSEV

SEQ ID NO: 140 - protein, 1225 aa, Homo sapiens
MDRGPAAVACTLLLALVACLAPASGQECDSAHFRCGSGHCIPADWRCDGTKDCSDDADEIGCAVVTCQQGYFKCQSEGQCIPNSWVCDQDQDCDDGSDERQDCSQSTCSSHQITCSNGQCIPSEYRCDHVRDCPDGADENDCQYPTCEQLTCDNGACYNTSQKCDWKVDCRDSSDEINCTEICLHNEFSCGNGECIPRAYVCDHDNDCQDGSDEHACNYPTCGGYQFTCPSGRCIYQNWVCDGEDDCKDNGDEDGCESGPHDVHKCSPREWSCPESGRCISIYKVCDGILDCPGREDENNTSTGKYCSMTLCSALNCQYQCHETPYGGACFCPPGYIINHNDSRTCVEFDDCQIWGICDQKCESRPGRHLCHCEEGYILERGQYCKANDSFGEASIIFSNGRDLLIGDIHGRSFRILVESQNRGVAVGVAFHYHLQRVFWTDTVQNKVFSVDINGLNIQEVLNVSVETPENLAVDWVNNKIYLVETKVNRIDMVNLDGSYRVTLITENLGHPRGIAVDPTVGKTVVHGGSLIPHPFGVSLFEGQVFFTDWTKMAVLKANKFTETNPQVYYQASLRPYGVTVYHSLRQPYATNPCKDNNGGCEQVCVLSHRTDNDGLGFRCKCTFGFQLDTDERHCIGREILAANRVENVESLAFDWISKNLYWTDSHYKSISVMRLADKTRRTVVQYLNNPRSVVVHPFAGYLFFTDWFRPAKIMRAWSDGSHLLPVINTTLGWPNGLAIDWAASRLYWVDAYFDKIEHSTFDGLDRRRLGHIEQMTHPFGLAIFGEHLFFTDWRLGAIIRVRKADGGEMTVIRSGIAYILHLKSYDVNIQTGSNACNQPTHPNGDCSHFCFPVPNFQRVCGCPYGMRLASNHLTCEGDPTNEPPTEQCGLFSFPCKNGRCVPNYYLCDGVDDCHDNSDEQLCGTLNNTCSSSAFTCGHGECIPAHWRCDKRNDCVDGSDEHNCPTHAPASCLDTQYTCDNHQCISKNWVCDTDNDCGDGSDEKNCNSTETCQPSQFNCPNHRCIDLSFVCDGDKDCVDGSDEVGCVLNCTASQFKCASGDKCIGVTNRCDGVFDCSDNSDEAGCPTRPPGMCHSDEFQCQEDGICIPNFWECDGHPDCLYGSDEHNACVPKTCPSSYFHCDNGNCIHRAWLCDRDNDCGDMSDEKDCPTQPFRCPSWQWQCLGHNICVNLSVVCDGIFDCPNGTDESPLCSKFPDHSLLAINSF

SEQ ID NO: 141 - protein, 1751 aa, Homo sapiens [sequence omitted]

SEQ ID NO: 142 - protein, 268 aa, Homo sapiens
KYVMQPDGIAVDWVGRHIYWSDVKNKRIEVAKLDGRYRKWLISTDLDQPAAIAVNPKLGLMFWTDWGKEPKIESAWMNGEDRNILVFEDLGWPTGLSIDYLNNDRIYWSDFKEDVIETIKYDGTDRRVIAKEAMNPYSLDIFEDQLYWISKEKGEVWKQNKFGQGKKEKTLVVNPWLTQVRIFHQLRYNKSVPNLCKQICSHLCLLRPGGYSCACPQGSSFIEGSTTECDAAIELPINLPPPCRCMHGGNCYFDETDLPKCKCPSGYT

SEQ ID NO: 143 - protein, 646 aa, Homo sapiens
MLAQHCVDANNTFCFDNPRGLALHPQYGYLYWADWGHRAYIGRVGMDGTNKSVIISTKLEWPNGITIDYTNDLLYWADAHLGYIEYSDLEGHHRHTVYDGALPHPFAITIFEDTIYWTDWNTRTVEKGNKYDGSNRQTLVNTTHRPFDIHVYHPYRQPIVSNPCGTNNGGCSHLCLIKPGGKGFTCECPDDFRTLQLSGSTYCMPMCSSTQFLCANNEKCIPIWWKCDGQKDCSDGSDELALCPQRFCRLGQFQCSDGNCTSPQTLCNAHQNCPDGSDEDRLLCENHHCDSNEWQCANKRCIPESWQCDTFNDCEDNSDEDSSHCASRTCRPGQFRCANGRCIPQAWKCDVDNDCGDHSDEPIEECMSSAHLCDNFTEFSCKTNYRCIPKWAVCNGVDDCRDNSDEQGCEERTCHPVGDFRCKNHHCIPLRWQCDGQNDCGDNSDEENCAPRECTESEFRCVNQQCIPSRWICDHYNDCGDNSDERDCEMRLMKLIVPHAFLMVHTARLLCSNAKTMFVSRHIGNVMAMMTVAMVQMKNFTCAWMFPVIHQTVSGVTTIAAFIVMRCAMVWMTVEMELMRQRSTVENRPLNLVQNMNISVAMGIAFHMTMCVMMPMTVVTGPMNWVAIKEKKEHVLKIYASKIVPN

SEQ ID NO: 144 - DNA, 10716 bp, Homo sapiens
  source 1..10716: mol_type = genomic DNA
actcgacctctggcggctagcggcgaggccccttcctgaccttcagggatcggccaccatggttggtgggaccagggtgagggtgggctggggttggagctggaactctgggggggtgggacagctgggcttctggatgctccctcagagggacagtctcccagcctgtgaggggatgggaggctggagggggaaacaaggggacgagggctgggctcctgggcctgggagggccctggagatgaacagatggcagcggccacctgccccaggagcccttggctgcagtatgggtgcgaccctcctgggccccaggctgagcccacagaggcaggaagcctgtggctatggagaccccatcccaaagacgctgccccttggtgaaccttcctctcccctcctgtaggcagacaggggaggtgctgagcacaggcctcagtctgaagcctgtagtccatttctccaggtatgggttctgggaccatccagctctaccaccagggacaccccaggtctgacctccttccttcctgccccccagtcccaccggaagttttccgcccctcggcacggacacctgggcttcctgccccataagaggagccaccggcaccggggcaaggtgaagacgtggccgcgggatgaccccagccagcccgtgcacctcacggccttcctgggctacaaggcgggcatgacccacaccctgcgggaggtgcaccggccggggctcagtgagtcacagttgggacccttgggggagggggagggctgaaccttccagatgctcggagccagaactcacgcttttggtccagacagggccacagtcccagggagcaccaggcctcgcccccgggaattggggtggacgctgagcacaggcagggcttccgggcgggttctgtcatggccccagctcgcagatgaggacattgaggcacaaagcagtgaggaacctggtccagtcaccggggcggtaagcgcaggagctaggattcaaaggccagcgccccaagccctcggttcaaaccacctgccaggacatctgcactttttggccatttcgggtctatttcatgtaccattatttcatatgtacgcctatgtatatagttagtttttgttgttttaatcgtagattcacaagtagttgtaagaaataatgcaggccgggcatggtggctcacgcctgtaatcccagcactttgggaggccgaggcaggaggatcatttgaggccaggagttgcagaccaacctggacggcatcgtgaaaccctatctctacaaaaaatacaaaaattagctgggcgttgtggcgagtgcctgtagtcgcagctacttgggaggctgaggtgggaggatcacttgagcttgggaagtcaaggctgcagtgagctatgattgcaccactgcattgcagcctgggtgacagagtgagaccctgtctcaaaaacagaaaaagaaatccattgtaatcattagaataacaaatgctcatttgggctcagccccaccctctggggaatgctgtcctggctggccccacactctcctgtcctgcccctatgtgggcggctctccactccctcccccacaggcctcaggaggtcccccttcatgccccatccctgtgtctcatccagaaatttccaaacgggaggaggtggaggcggtgacaattgtagaaacgccgcccctagtggtggtgggcgtggtgggctacgtggccacccctcgaggtctccggagcttcaagaccatctttgcagaacacctcagtgatgagtgccggcgccgattctacaaggactggtgagcaccgcccttggctgggccgtccaagggctgctgggaccacagaagttgggtgcctgaggctctagctcttgctgaaatgataggtgtgggtgagtaggaagcgaagtctcaaccgtctgtgggaggtaggagtgtctgtgtgtgtgtgtgtgtgtgttgtgtggttgccttcatttcaataaaagatgagtaggctgggcgtgctggctcacgcctgtaatcccagcactttgggaggccgaggcgggtggatcacttgaggtcaggagtttgagaccagcttggccaacatggtgaaaccccatctctaccaaaaaatacaaaaattagctggctggggtggtgcgcacctgtagtccagctactcaggaggctgaggtgggagaatcacttgaactgggaggtgaaggttgcagtgagctgagatcgtgccactgcactgcagcctgggtggcagagtgaaaccctgtctcaatctcaagaaaaacacaaaaaacaaaaaacatgagtactagaaggctggagatgaaatcaggatggaggaaaaagaggaaacaaatattctaatcctcagggttaattaaaaggctaatttgggcggcttgtggtggctcacgactgtagtagtcccagcactttgggaggccaaggcgggtggctcatttgaggtcaggagttcgagaccagcctggccaacatggtgaaaacccgtctctactaaaaatacaaaaaaaaaaataaaaataaaaaaataagctgggcgtggtggcagacacctgtaatcccagctacttgggaggctgaggcaggagaatcgcttgagcctgggaggtggagattgtagtgagctgagattgtgccgctgcactccagtgtgagcgacagagtgagaccctgtcaaaaaacaaacaaacaaaaaaccaaaaggctaatttgatggaatgttagcattggctctgagtttcctagcagccattgtgaaaagtgaaatagccagctgagaagctcttacacatagaaaggtattctcgggcctcaaatcttccctggcagtaagtcctgaaagaaaccttggtttcttcacctatagaatgggaataataataataataataataataataataataataataataatgtccacctcccagaactctgctgagggttagaaactatggcttctggctgggcacaatggttcattcctataattccagcactttgggaggctaaggcaggcagaccgtttgagctcagggcttcgagaccagcctgggcaacatgacgaaacccgtctctacaaaaaaatacaaaaaattagccgggcacggtggcgcatgcctgtggtctcagctacatggggggtgaggtgggaggattgcttgagtctgggagctccaggctgcagtgagctgtgtttgtgccactgcactccagcctgggagagaaagtgagaccctatctccaaaaacaaaaaagaaaggatggctcccaagcccgaggtgcctggccatggcacccactgcacccttgagaagtgggaccagcagtctgagccatgtggcaggtggggtggtctctaggtgcctggactgcagggctggccagccgccttctctgagcttctgcacctctgccactcactctcaggccccgggaaacagggagggtacctactttacagaggaggaaaccggggcctagagggggagagacagtctatgttcaaagatggtggctggaaccagctcagaggcctccgggtggggggcggtcccagaggtaggacccctgcttggtgggctgggggtgaggtgggggcaggataggcctggggagctgccccggttgggggcttctgagcaccctcctgtgcatggctcaggcacaagagcaagaagaaagccttcaccaaggcctgcaagaggtggcgggacacagacgggaaaaagcagctacagaaggacttcgccgccatgaagaagtactgcaaggtcattcgggtcattgtccacactcaggtcagcccccggccctccgctgtcggtcagtccctaggaccacgctccctcaccccagcttccaggagctgtggcaaatgtcagcctaaaaatacccgagcctcggcacagacccagaggagcggctgaccagcctcgctggccacgtgcagccccaggcatggctgctgaaaggcatcggtgccttctggggtgccaggggcatcagccacgccggctagtcaactaagaccctggcacgccctgaagagccgggtccccagccaagtgtgctgtgtggagggctggtcacctctcttcggtttccagcgtaagtgtgcacaggaatccgtgtttgtacatgggtctggcttgctgtaggctgacaggcaggcggcaccctccagcttattctggaacactctttggcatctttgtcctcagggaaggcttcccgaggccctagagcagtgcccccgaccctgagcttcccacagcccccacactgcccccagctgctcgcacacttgtacaccatgcctgggccagtcactggtgtgtgttcatctccctggacagactccaggcaggcagaggccctgggcggggccacagctgccaccaagagcctggtatgcaggaggtgctctgtaaatacctgccccatacatacccgccccatacatacccaccccatacatacccaccccatacatacctgccctgtccatacctgccccctacatacctgccccgtccatacctgccccctacatacctgccccgtccatacctgccccctacatacctgctctgtctatacctgccccgtccatacctgctccctacatacctgccccctacatacctgccctgtccatacctgccccgtccatacctgccccttacatacctgccccttacatacctgccccttacatacctgccccctacatacctgccccctacatacctgccccctacatacctgccccctacatacctaccccgtccatacctaccccgtccatacctgccccgtccatacctgccccgtccatacctgccccgtccatacctgccccctacatacctgccccctacatacctgccccgtacatacctgccccgtacatactgccccgtccatacctgccccgtacatacctgcctcatacatacctgccccatacatacctatgggtcactatgtgttccccgctggcctctctgtctccacctctacattgcacagcctgtgcttcacacagcaccagccagagaccttaccaaaaaaaaaaaaaaaaaatcaagccagacatggtggatcacgcctgtaaccccagcactttgggaggccaaggcaggcggatcacctgaggtcaggagttcgagaccagcctggccaacatggcaaaaccccatctctagtaaaaatacaaacaaattagctgggcatggtgggcgcctgcaatcccagctacttgggagactgaggcaggagaatcacttgaaactgggaggtggaggttgcagtgagccaagatcgcaccatggcactccagcccgggcgatagagtctcaaaaaaaaaaaaaaaaaaaaaagaaaaaaaaaaaaaacaaaaatcaggcccagtggcttacaccagtgatcctagcactgtgggaggacaaggtggcagcccgggcaacttaacgagacctcatctctacaaaaaaattaaaaattggctgggcatggtggtgcatgcctgtagttccagctacttggagaggggtgctgaggcaggaggacttcgagaccagtcttggcaacatagggagatccccatctctacaaaaaaaaaaaaaaaaagccaggcgcggtggctcacgtctgtaattccagcactttgggaggccgaggcaggcagatcaggtcaggagattgagaccatcctagctaacgcggtgaaaccccgtctctactaaaaatacaaaaaattagccaggcgtagtggcacaacctgtagtcccagctactcgggaggctgaggtaggagaatggcgtgaacccaggaggcagagcttgcagtgagccgagattgcgccactgcactccagcctgggcgacagagcaaaactccgtctcaaaaaacaaacaaacaaacaaacaaaaaaaaaacaactgggcatggtggtgagtgcctgtcatcccagctactcaggaggctaaggtgggaggattgcttcggcccgggaggctgaggctgcagtgagccttgatcatgccactgcactccagcctgggtgacagagcgagaccctgtctcaaaataaaaatataaaaaaataaaaatcaggccaggtgcagtggctcatgcctgaaccctagcactttgggaggtcaaggtgggtggatcgcttgaagtcaggagtttgaaaccagcctggccaacatgggaaaccccaactgtactaaaaatacaaaaaaattagccgggcatggtggcacacacctgtaatcccagttactcaagaagctgaggcaggagaatcacttgattcagggaggcagaggttgcagtgagccgagatcgccccactgtactccagtctgggcaacagagcgagactccattaaaaaaaggccgggcgtggtggctcacgcctgtaatcccagcactttgggaggctgaggcgggcggatcatgaggtcaggagatgcagaccatccgggccaacacagtgaaaccctgtctcaactaaaaatacaaaaaattagctggtcgaggtggcgggcacctgtagtcccagctactcaggaggctgaggcaggggaatggcgtgaacccgggaggcagagcttgcagtgagccgagatcatgccattgcactccagcctgggcgatagagcgagactcaaaaaaaaaaaaaaaaaaaaaaatccaatcagatcacatcgcagcctgcacttggaagaaagtccgagctccccactcccaggtgctggcccacgccccttgctccccaccgtctgcccacactggtctcctctctgtcccaccaactttccaaggcctcctctgccaccaggcctgtgcaaatgcggggtcctgctgcccagagcctctccaatgtttgcctcgtggctcctacttgttagcagcggcaccttctcagagaagccctctctgccctgaccactgtatctgaaacaccagcccccatagcccatcagagcactctgtcctctccaagagttacttggtttccttctgtcccccagtgagatggtggctcccgaggtgtgggactctgtctgcctcattctgcaccggatccgcagtgcctagcacaacacatgggttgcaacctgatcctgggaacacctgtgaatgaatgcatgcgtggaaggcggcaggggtcactgctggccatgccatgtttcaggtgggggtgtgatcccgtgggccgtggcgtgacctccggccatgtcctgcagatgaaactgctgcccttccggcagaagaaggcccacatcatggagatccagctgaacggtggcacggtggccgagaaggtggcctgggcccaggcccggctggagaagcaggtgcccgtgcacagcgtgttcagccagagtgaggtcattgatgtcattgctgtcaccaagggtcgaggcgtcaaaggtagggctcagtgaggatggcagctccagggcaggctgcctggaggcagtggggaccagcctggcctctcagccaccagcccctctcactcacaggggtcacaagccgctggcataccaagaagctgccgcggaagacccataagggcctgcgcaaggtggcctgcattggcgcctggcaccccgcccgcgtgggctgctccattgctcgggccgggcagaagggctatcaccaccgcacggagctcaacaagaaggtgcgtcctcagccggggtacggggacactgtgtggtcggaccccagccctcagtactggcctcagtgggtggggtgcatgacccagacactgccggggacacaagatgcccccaccagcactgagtctgagcatgtgggcggatgggcctggatgggctgctggcctcagaggccacttcctgcccctggcatgtgcccccttctggcagatcttccgcatcggcaggggcccgcacatggaggacgggaagctggtgaagaacaatgcatccaccagctacgacgtgactgccaagtccatcacaccgctggtgaggctgggagggggcgactgccaggcccatcacaccgctgatgatggctggagtggggtcaggctggccggggggcctggtatacatgtagggggcatgccccagcctcagctggacgctccctgccccaagggctcaagatttttgccccacagctggacgctgccccgccaggcacactggacagaagaccttgacagctgggcagtgatgtgggacccttgccttggctgtccaaaacatttggatatagtcacaagcaagaaatctctgctgcgtcccacatcctccgagcctcctctggaggcagcttccactccagctgctgtcatgtgggtgtggagtgcggcagctcctactgtggcctgggagtcaggccacctgggctcaaaccgcatctccaggacttagcagctgtagaggctggagcaagtgactccactcctctgatcctcagtctcccccaacaaaaatgcagactgtcaagtgagataatgcatgaaaaggacttagcttgtgactcagatgctgccctcagtaggggcggcgtgatagtcacccctacatctgggggctgggcacggggctcctgcctatcactgccccctctgggggttctgctagggcccccagccacccactaactcagaagccctttccgggcctggcctctgacctgtgtcctctgcagggtggcttcccccactacggggaagtgaacaacgacttcgtcatgctgaagggttgtattgctggtaccaagaagcgggtcattacgctgagaaaggttggcagtgctgggtgggctggggagtgggtgcccgagggctgccagcctgtcctgccctgcggcctgctacgagcgggatggagtggtgggagcagaaggggagggctctggtaggaactaggtgagcaagaccttcctggtggggcttggaggttcacagcagggtgtgggggatccccacacttgatgtttactttaccatggattccccagtccctcctggtgcatcacagtcgccaagccgtggagaatattgagctcaagttcattgacaccacctccaagttcggccatggccgcttccagacagcccaagagaagagggccttcatggtgagctcaccgcccccatccttgttcttctctggggctccagctccacatccagcctgcccgagtagggagctggagctggcagggactcccctgagctcaactgcaggagagactcttttttttttatttattttattttttgagatggagtctcgctctgtcacccaggctggagtgctgtgccgtgatcttggctcactgccacctccacctcctgggttcaagcaattctccagattcagcctacccagtcgttggtactacaggcacgtgccaccacgccaggctaattttctgtatttttagtagggatggggtttcatcgtattagccaggatggtctctatctcctgacctcatgatccgaccgcctcggcctcccaaagtgctgggattacagacatgagccaccgtgcccggcctgcaggagagactcttaagggtctatccctgggcactgattctttagaagagaaggtgggggaggaagcagccttaggggggcagtagggccggccctgagtgatctagagcctggctgggggagggcgtgtttctggccagagtgactaaggctcctcctgcaccaccctctcaaccagggcccccaaaagaagcatctggagaaggaaacgccggagacctcgggagacttgtaggctgtgtggggtggatgaaccctgaagcgcaccgcactgtctgccccaatgtctaacaaaggccggaggcgactcttcctgcgaggtctcagagcgctgtgtaaccgcccaaggggttcaccttgcctgctgcctagacaaagccgattcattaagacaggggaattgcaatagagaaagagtaattcacacagagctggctgtgcgggagaccggagttttatgttttattattactcaaatcgatctctttgagcatttgcggagcagaggttttttttttttttttttttgagagagtcttgatcttgtcgcccaggctgctggagtgccggggagcagagtttttaaggataacttggcgggtggggagagccagtgagccaggagagccgattggtcagggaggaaatcacagggagtcagctgtcttcttgcgctgagtcagctcctgggtggtggccacaagatcagatgagccagtttatcaatctggttggtgccagcagatccatcaagttgcagggtcggcaaaatatctcaagcactgatcttaggggcagcttagggagggtcagaatcttgtagcctccagatgcacgactcctaaaccataattcccaatattgtggctaatgttagtcctaaaaatgcaatctagtccccaggcaaggaggtggtctgctttgggaaagggctgttactgtctttgttttaaactataaactggctgggcgcggtggctcacgcctgtaatcccagcactttgggaggccaagatgggcggatcacctgaggtcgggagttcaagaccagcctggccaacatcgagaaacctcgtctctattaaaaatacaaaatta

SEQ ID NO: 145 - RNA, 2145 nt, Homo sapiens
  source 1..2145: mol_type = other RNA
actcgacctctggcggctagcggcgaggccccttcctgaccttcagggatcggccaccatgtcccaccggaagttttccgcccctcggcacggacacctgggcttcctgccccataagaggagccaccggcaccggggcaaggtgaagacgtggccgcgggatgaccccagccagcccgtgcacctcacggccttcctgggctacaaggcgggcatgacccacaccctgcgggaggtgcaccggccggggctcaaaatttccaaacgggaggaggtggaggcggtgacaattgtagaaacgccgcccctagtggtggtgggcgtggtgggctacgtggccacccctcgaggtctccggagcttcaagaccatctttgcagaacacctcagtgatgagtgccggcgccgattctacaaggactggcacaagagcaagaagaaagccttcaccaaggcctgcaagaggtggcgggacacagacgggaaaaagcagctacagaaggacttcgccgccatgaagaagtactgcaaggtcattcgggtcattgtccacactcagatgaaactgctgcccttccggcagaagaaggcccacatcatggagatccagctgaacggtggcacggtggccgagaaggtggcctgggcccaggcccggctggagaagcaggtgcccgtgcacagcgtgttcagccagagtgaggtcattgatgtcattgctgtcaccaagggtcgaggcgtcaaaggggtcacaagccgctggcataccaagaagctgccgcggaagacccataagggcctgcgcaaggtggcctgcattggcgcctggcaccccgcccgcgtgggctgctccattgctcgggccgggcagaagggctatcaccaccgcacggagctcaacaagaagatcttccgcatcggcaggggcccgcacatggaggacgggaagctggtgaagaacaatgcatccaccagctacgacgtgactgccaagtccatcacaccgctgggtggcttcccccactacggggaagtgaacaacgacttcgtcatgctgaagggttgtattgctggtaccaagaagcgggtcattacgctgagaaagtccctcctggtgcatcacagtcgccaagccgtggagaatattgagctcaagttcattgacaccacctccaagttcggccatggccgcttccagacagcccaagagaagagggccttcatgggcccccaaaagaagcatctggagaaggaaacgccggagacctcgggagacttgtaggctgtgtggggtggatgaaccctgaagcgcaccgcactgtctgccccaatgtctaacaaaggccggaggcgactcttcctgcgaggtctcagagcgctgtgtaaccgcccaaggggttcaccttgcctgctgcctagacaaagccgattcattaagacaggggaattgcaatagagaaagagtaattcacacagagctggctgtgcgggagaccggagttttatgttttattattactcaaatcgatctctttgagcatttgcggagcagaggttttttttttttttttttttgagagagtcttgatcttgtcgcccaggctgctggagtgccggggagcagagtttttaaggataacttggcgggtggggagagccagtgagccaggagagccgattggtcagggaggaaatcacagggagtcagctgtcttcttgcgctgagtcagctcctgggtggtggccacaagatcagatgagccagtttatcaatctggttggtgccagcagatccatcaagttgcagggtcggcaaaatatctcaagcactgatcttaggggcagcttagggagggtcagaatcttgtagcctccagatgcacgactcctaaaccataattcccaatattgtggctaatgttagtcctaaaaatgcaatctagtccccaggcaaggaggtggtctgctttgggaaagggctgttactgtctttgttttaaactataaactggctgggcgcggtggctcacgcctgtaatcccagcactttgggaggccaagatgggcggatcacctgaggtcgggagttcaagaccagcctggccaacatcgagaaacctcgtctctattaaaaatacaaaatta

SEQ ID NO: 146 - RNA, 2142 nt, Homo sapiens
  source 1..2142: mol_type = other RNA
gcggcgaggccccttcctgaccttcagggatcggccaccatgtcccaccggaagttttccgcccctcggcacggacacctgggcttcctgccccataagaggagccaccggcaccggggcaaggtgaagacgtggccgcgggatgaccccagccagcccgtgcacctcacggccttcctgggctacaaggcgggcatgacccacaccctgcgggaggtgcaccggccggggctcaaaatttccaaacgggaggaggtggaggcggtgacaattgtagaaacgccgcccctagtggtggtgggcgtggtgggctacgtggccacccctcgaggtctccggagcttcaagaccatctttgcagaacacctcagtgatgagtgccggcgccgattctacaaggactggcacaagagcaagaagaaagccttcaccaaggcctgcaagaggtggcgggacacagacgggaaaaagcagctacagaaggacttcgccgccatgaagaagtactgcaaggtcattcgggtcattgtccacactcagatgaaactgctgcccttccggcagaagaaggcccacatcatggagatccagctgaacggtggcacggtggccgagaaggtggcctgggcccaggcccggctggagaagcaggtgcccgtgcacagcgtgttcagccagagtgaggtcattgatgtcattgctgtcaccaagggtcgaggcgtcaaaggggtcacaagccgctggcataccaagaagctgccgcggaagacccataagggcctgcgcaaggtggcctgcattggcgcctggcaccccgcccgcgtgggctgctccattgctcgggccgggcagaagggctatcaccaccgcacggagctcaacaagaagatcttccgcatcggcaggggcccgcacatggaggacgggaagctggtgaagaacaatgcatccaccagctacgacgtgactgccaagtccatcacaccgctgggtggcttcccccactacggggaagtgaacaacgacttcgtcatgctgaagggttgtattgctggtaccaagaagcgggtcattacgctgagaaagtccctcctggtgcatcacagtcgccaagccgtggagaatattgagctcaagttcattgacaccacctccaagttcggccatggccgcttccagacagcccaagagaagagggccttcatgggcccccaaaagaagcatctggagaaggaaacgccggagacctcgggagacttgtaggctgtgtggggtggatgaaccctgaagcgcaccgcactgtctgccccaatgtctaacaaaggccggaggcgactcttcctgcgaggtcgcagagtgctgtgtaaccgcccaaggggttcaccttgcctgctgcctagacaaagccgattcattaagacaggggaattgcaatagagaaagagtaattcacgcagagctggctgtgcgggagaccggagttttatgttttattattactcaaatcgatctctttgagcatttgcggagcagaggtttttttttttttttttttgagagagtcttgatcttgtcgcccaggctgctggagtgccggggagcagagtttttaaggataacttggcgggtggggagagccagtgagccaggagtgccgattggtcagggaggaaatcacagggagtcagctgtcttcttgcgctgagtcagctcctgggtggtggccacaagatcagatgagccagtttatcaatctggttggtgccagcagatccatcaagttgcagggtcggcaaaatatctcaagcactgatcttaggggcagcttagggagggtcagaatcttgtagcctccagatgcacgactcctaaaccataattcccaatattgtggctaatgttagtcctaaaaatgcaatctagtccccaggcaaggaggtggtctgctttgggaaagggctgttactgtctttgttttaaactataaactggctgggcgcggtggctcacgcctgtaatcccagcactttgggaggccaagatgggcggatcacctgaggtcgggagttcaagaccagcctggccaacatcgagaaacctcgtctctattaaaaatacaaaattaaaaaaaaaaaaaaaaaa

SEQ ID NO: 147 - RNA, 1548 nt, Homo sapiens
  source 1..1548: mol_type = other RNA
ggcggctagcggcgaggccccttcctgtaccttcagggatcggccaccatgtcccaccggaagttttccgcccctcggcacggacacctgggcttcctgccccataagaggagccaccggcaccggggcaaggtgaagacgtggccgcgggatgaccccagccagcccgtgcacctcacggccttcctgggctacaaggcgggcatgacccacaccctgcgggaggtgcaccggccggggctcaaaatttccaaacgggaggaggtggaggcggtgacaattgtagaaacgccgcccctagtggtggtgggcgtggtgggctacgtggccacccctcgaggtctccggagcttcaagaccatctttgcagaacacctcagtgatgagtgccggcgccgattctacaaggactggcacaagagcaagaagaaagccttcaccaaggcctgcaagaggtggcgggacacagacgggaaaaagcagctacagaaggacttcgccgccatgaagaagtactgcaaggtcattcgggtcattgtccacactcagatgaaactgctgcccttccggcagaagaaggcccacatcatggagatccagctgaacggtggcacggtggccgagaaggtggcctgggcccaggcccggctggagaagcaggtgcccgtgcacagcgtgttcagccagagtgaggtcattgatgtcattgctgtcaccaagggtcgaggcgtcaaaggggtcacaagccgctggcataccaagaagctgccgcggaagacccataagggcctgcgcaaggtggcctgcattggcgcctggcaccccgcccgcgtgggctgctccattgctcgggccgggcagaagggctatcaccaccgcacggagctcaacaagaagatcttccgcatcggcaggggcccgcacatggaggacgggaagctggtgaagaacaatgcatccaccagctacgacgtgactgccaagtccatcacaccgctgggtggcttcccccactacggggaagtgaacaacgacttcgtcatgctgaagggttgtattgctggtaccaagaagcgggtcattacgctgagaaagtccctcctggtgcatcacagtcgccaagccgtggagaatattgagctcaagttcattgacaccacctccaagttcggccatggccgcttccagacagcccaagagaagagggccttcatgggcccccaaaagaagcatctggagaaggaaacgccggagacctcgggagacttgtaggctgtgtggggtggatgaaccctgaagcgcaccgcactgtctgccccaatgtctaacaaaggccggaggcgactcttcctgcgaggtctcagagcgctgtgtaaccgcccaaggggttcaccttgcctgctgcctagacaaagccgattcattaagacaggggaattgcaatagagaaagagtaattcacacagagctggctgtgcgggagaccggagttttatgttttattattactcaaatcgatctctttgagcaaaaaaaaaaaaaaaaaaa

SEQ ID NO: 148 - RNA, 1283 nt, Homo sapiens
  source 1..1283: mol_type = other RNA
cactcgacctctggcggctagcggcgaggccccttcctgaccttcagggatcggccaccatgtcccaccggaagttttccgcccctcggcacggacacctgggcttcctgccccataagaggagccaccggcaccggggcaaggtgaagacgtggccgcgggatgaccccagccagcccgtgcacctcacggccttcctgggctacaaggcgggcatgacccacaccctgcgggaggtgcaccggccggggctcaaaatttccaaacgggaggaggtggaggcggtgacaattgtagaaacgccgcccctagtggcggtgggcgtggtgggctacgtggccacccctcgaggtctccggagcttcaagaccatctttgcagaacacctcagtgatgagtgccggcgccgattctacaaggactggcacaagagcaagaagaaagccttcaccaaggcctgcaagaggtggcgggacacagacgggaaaaagcagctacagaaggacttcgccgccatgaagaagtactgcaaggtcattcgggtcattgtccacactcagatgaaactgctgcccttccggcagaagaaggcccacatcatggagatccagctgaacggtggcacggtggccgagaaggtggcctgggcccaggcccggctggagaagcaggtgcccgtgcacagcgtgttcagccagagtgaggtcattgatgtcattgctgtcaccaagggtcgaggcgtcaaaggggtcacaagccgctggcataccaagaagctgccgcggaagacccataagggcctgcgcaaggtggcctgcattggcgcctggcaccccgcccgcgtgggctgctccattgctcgggccgggcagaagggctatcaccaccgcacggagctcaacaagaagatcttccgcatcggcaggggcccgcacatggaggacgggaagctggtgaagaacaatgcatccaccagctacgacgtgactgccaagtccatcacaccgctgggtggcttcccccactacggggaagtgaacaacgacttcgtcatgctgaagggttgtattgctggtaccaagaagcgggtcattacgctgagaaagtccctcctggtgcatcacagtcgccaagccgtggagaatattgagctcaagttcattgacaccacctccaagttcggccatggccgcttccagacagcccaagagaagagggccttcatgggcccccaaaagaagcatctggagaaggaaacgccggagacctcgggagacttgtag

SEQ ID NO: 149 - RNA, 2182 nt, Homo sapiens
  source 1..2182: mol_type = other RNA
aatctgggaactggcagctgtgagtcctggccctgccactcgacctctggcggctagcggcgaggccccttcctgaccttcagggatcggccaccatgtcccaccggaagttttccgcccctcggcacggacacctgggcttcctgccccataagaggagccaccggcaccggggcaaggtgaagacgtggccgcgggatgaccccagccagcccgtgcacctcacggccttcctgggctacaaggcgggcatgacccacaccctgcgggaggtgcaccggccggggctcaaaatttccaaacgggaggaggtggaggcggtgacaattgtagaaacgccgcccctagtggtggtgggcgtggtgggctacgtggccacccctcgaggtctccggagcttcaagaccatctttgcagaacacctcagtgatgagtgccggcgccgattctacaaggactggcacaagagcaagaagaaagccttcaccaaggcctgcaagaggtggcgggacacagacgggaaaaagcagctacagaaggacttcgccgccatgaagaagtactgcaaggtcattcgggtcattgtccacactcagatgaaactgctgcccttccggcagaagaaggcccacatcatggagatccagctgaacggtggcacggtggccgagaaggtggcctgggcccaggcccggctggagaagcaggtgcccgtgcacagcgtgttcagccagagtgaggtcattgatgtcattgctgtcaccaagggtcgaggcgtcaaaggggtcacaagccgctggcataccaagaagctgccgcggaagacccataagggcctgcgcaaggtggcctgcattggcgcctggcaccccgcccgcgtgggctgctccattgctcgggccgggcagaagggctatcaccaccgcacggagctcaacaagaagatcttccgcatcggcaggggcccgcacatggaggacgggaagctggtgaagaacaatgcatccaccagctacgacgtgactgccaagtccatcacaccgctgggtggcttcccccactacggggaagtgaacaacgacttcgtcatgctgaagggttgtattgctggtaccaagaagcgggtcattacgctgagaaagtccctcctggtgcatcacagtcgccaagccgtggagaatattgagctcaagttcattgacaccacctccaagttcggccatggccgcttccagacagcccaagagaagagggccttcatgggcccccaaaagaagcatctggagaaggaaacgccggagacctcgggagacttgtaggctgtgtggggtggatgaaccctgaagcgcaccgcactgtctgccccaatgtctaacaaaggccggaggcgactcttcctgcgaggtctcagagcgctgtgtaaccgcccaaggggttcaccttgcctgctgcctagacaaagccgattcattaagacaggggaattgcaatagagaaagagtaattcacacagagctggctgtgcgggagaccggagttttatgttttattattactcaaatcgatctctttgagcatttgcggagcagaggttttttttttttttttttttgagagagtcttgatcttgtcgcccaggctgctggagtgccggggagcagagtttttaaggataacttggcgggtggggagagccagtgagccaggagagccgattggtcagggaggaaatcacagggagtcagctgtcttcttgcgctgagtcagctcctgggtggtggccacaagatcagatgagccagtttatcaatctggttggtgccagcagatccatcaagttgcagggtcggcaaaatatctcaagcactgatcttaggggcagcttagggagggtcagaatcttgtagcctccagatgcacgactcctaaaccataattcccaatattgtggctaatgttagtcctaaaaatgcaatctagtccccaggcaaggaggtggtctgctttgggaaagggctgttactgtctttgttttaaactataaactggctgggcgcggtggctcacgcctgtaatcccagcactttgggaggccaagatgggcggatcacctgaggtcgggagttcaagaccagcctggccaacatcgagaaacctcgtctctattaaaaatacaaaatta

SEQ ID NO: 150 - RNA, 575 nt, Homo sapiens
  source 1..575: mol_type = other RNA
gaagccagtgagattacgagcccactggcaggatgaacaactccagacgcgcggcgccttaagagctgtaacaccgcgaaggtctgtagcttcattcctgagctagcgagagcgcgaacctaccagaaggaagaaactccgaacacatcggaacatcagaacgagcaaactccggacaccccgcctttaggaactgcaacactcaccgcgagggtccgtggcttcattcttgaagtcagtgagaccaagaactcaccaattccggacacaacaggatctacggtcacagaaactcccaccggaagttttccgcccctcggcacggacacctgggcttcctgccccataagaggagccaccggcaccggggcaaggtgaagacgtggccgcgggatgaccccagccagcccgtgcacctcacggccttcctgggctacaaggcgggcatgacccacaccctgcgggaggtgcaccggccggggctcaaaatttccaaacgggaggaggtggaggcggtgacaattgtagaaacgccgcccctagtggtggtgggcgtggtgggctacgtggccacc

SEQ ID NO: 151 - DNA, 2145 bp, Homo sapiens
  source 1..2145: mol_type = genomic DNA
actcgacctctggcggctagcggcgaggccccttcctgaccttcagggatcggccaccatgtcccaccggaagttttccgcccctcggcacggacacctgggcttcctgccccataagaggagccaccggcaccggggcaaggtgaagacgtggccgcgggatgaccccagccagcccgtgcacctcacggccttcctgggctacaaggcgggcatgacccacaccctgcgggaggtgcaccggccggggctcaaaatttccaaacgggaggaggtggaggcggtgacaattgtagaaacgccgcccctagtggtggtgggcgtggtgggctacgtggccacccctcgaggtctccggagcttcaagaccatctttgcagaacacctcagtgatgagtgccggcgccgattctacaaggactggcacaagagcaagaagaaagccttcaccaaggcctgcaagaggtggcgggacacagacgggaaaaagcagctacagaaggacttcgccgccatgaagaagtactgcaaggtcattcgggtcattgtccacactcagatgaaactgctgcccttccggcagaagaaggcccacatcatggagatccagctgaacggtggcacggtggccgagaaggtggcctgggcccaggcccggctggagaagcaggtgcccgtgcacagcgtgttcagccagagtgaggtcattgatgtcattgctgtcaccaagggtcgaggcgtcaaaggggtcacaagccgctggcataccaagaagctgccgcggaagacccataagggcctgcgcaaggtggcctgcattggcgcctggcaccccgcccgcgtgggctgctccattgctcgggccgggcagaagggctatcaccaccgcacggagctcaacaagaagatcttccgcatcggcaggggcccgcacatggaggacgggaagctggtgaagaacaatgcatccaccagctacgacgtgactgccaagtccatcacaccgctgggtggcttcccccactacggggaagtgaacaacgacttcgtcatgctgaagggttgtattgctggtaccaagaagcgggtcattacgctgagaaagtccctcctggtgcatcacagtcgccaagccgtggagaatattgagctcaagttcattgacaccacctccaagttcggccatggccgcttccagacagcccaagagaagagggccttcatgggcccccaaaagaagcatctggagaaggaaacgccggagacctcgggagacttgtaggctgtgtggggtggatgaaccctgaagcgcaccgcactgtctgccccaatgtctaacaaaggccggaggcgactcttcctgcgaggtctcagagcgctgtgtaaccgcccaaggggttcaccttgcctgctgcctagacaaagccgattcattaagacaggggaattgcaatagagaaagagtaattcacacagagctggctgtgcgggagaccggagttttatgttttattattactcaaatcgatctctttgagcatttgcggagcagaggttttttttttttttttttttgagagagtcttgatcttgtcgcccaggctgctggagtgccggggagcagagtttttaaggataacttggcgggtggggagagccagtgagccaggagagccgattggtcagggaggaaatcacagggagtcagctgtcttcttgcgctgagtcagctcctgggtggtggccacaagatcagatgagccagtttatcaatctggttggtgccagcagatccatcaagttgcagggtcggcaaaatatctcaagcactgatcttaggggcagcttagggagggtcagaatcttgtagcctccagatgcacgactcctaaaccataattcccaatattgtggctaatgttagtcctaaaaatgcaatctagtccccaggcaaggaggtggtctgctttgggaaagggctgttactgtctttgttttaaactataaactggctgggcgcggtggctcacgcctgtaatcccagcactttgggaggccaagatgggcggatcacctgaggtcgggagttcaagaccagcctggccaacatcgagaaacctcgtctctattaaaaatacaaaatta

SEQ ID NO: 152 - DNA, 2142 bp, Homo sapiens
  source 1..2142: mol_type = genomic DNA
gcggcgaggccccttcctgaccttcagggatcggccaccatgtcccaccggaagttttccgcccctcggcacggacacctgggcttcctgccccataagaggagccaccggcaccggggcaaggtgaagacgtggccgcgggatgaccccagccagcccgtgcacctcacggccttcctgggctacaaggcgggcatgacccacaccctgcgggaggtgcaccggccggggctcaaaatttccaaacgggaggaggtggaggcggtgacaattgtagaaacgccgcccctagtggtggtgggcgtggtgggctacgtggccacccctcgaggtctccggagcttcaagaccatctttgcagaacacctcagtgatgagtgccggcgccgattctacaaggactggcacaagagcaagaagaaagccttcaccaaggcctgcaagaggtggcgggacacagacgggaaaaagcagctacagaaggacttcgccgccatgaagaagtactgcaaggtcattcgggtcattgtccacactcagatgaaactgctgcccttccggcagaagaaggcccacatcatggagatccagctgaacggtggcacggtggccgagaaggtggcctgggcccaggcccggctggagaagcaggtgcccgtgcacagcgtgttcagccagagtgaggtcattgatgtcattgctgtcaccaagggtcgaggcgtcaaaggggtcacaagccgctggcataccaagaagctgccgcggaagacccataagggcctgcgcaaggtggcctgcattggcgcctggcaccccgcccgcgtgggctgctccattgctcgggccgggcagaagggctatcaccaccgcacggagctcaacaagaagatcttccgcatcggcaggggcccgcacatggaggacgggaagctggtgaagaacaatgcatccaccagctacgacgtgactgccaagtccatcacaccgctgggtggcttcccccactacggggaagtgaacaacgacttcgtcatgctgaagggttgtattgctggtaccaagaagcgggtcattacgctgagaaagtccctcctggtgcatcacagtcgccaagccgtggagaatattgagctcaagttcattgacaccacctccaagttcggccatggccgcttccagacagcccaagagaagagggccttcatgggcccccaaaagaagcatctggagaaggaaacgccggagacctcgggagacttgtaggctgtgtggggtggatgaaccctgaagcgcaccgcactgtctgccccaatgtctaacaaaggccggaggcgactcttcctgcgaggtcgcagagtgctgtgtaaccgcccaaggggttcaccttgcctgctgcctagacaaagccgattcattaagacaggggaattgcaatagagaaagagtaattcacgcagagctggctgtgcgggagaccggagttttatgttttattattactcaaatcgatctctttgagcatttgcggagcagaggtttttttttttttttttttgagagagtcttgatcttgtcgcccaggctgctggagtgccggggagcagagtttttaaggataacttggcgggtggggagagccagtgagccaggagtgccgattggtcagggaggaaatcacagggagtcagctgtcttcttgcgctgagtcagctcctgggtggtggccacaagatcagatgagccagtttatcaatctggttggtgccagcagatccatcaagttgcagggtcggcaaaatatctcaagcactgatcttaggggcagcttagggagggtcagaatcttgtagcctccagatgcacgactcctaaaccataattcccaatattgtggctaatgttagtcctaaaaatgcaatctagtccccaggcaaggaggtggtctgctttgggaaagggctgttactgtctttgttttaaactataaactggctgggcgcggtggctcacgcctgtaatcccagcactttgggaggccaagatgggcggatcacctgaggtcgggagttcaagaccagcctggccaacatcgagaaacctcgtctctattaaaaatacaaaattaaaaaaaaaaaaaaaaaa

SEQ ID NO: 153 - DNA, 1548 bp, Homo sapiens
  source 1..1548: mol_type = genomic DNA
ggcggctagcggcgaggccccttcctgtaccttcagggatcggccaccatgtcccaccggaagttttccgcccctcggcacggacacctgggcttcctgccccataagaggagccaccggcaccggggcaaggtgaagacgtggccgcgggatgaccccagccagcccgtgcacctcacggccttcctgggctacaaggcgggcatgacccacaccctgcgggaggtgcaccggccggggctcaaaatttccaaacgggaggaggtggaggcggtgacaattgtagaaacgccgcccctagtggtggtgggcgtggtgggctacgtggccacccctcgaggtctccggagcttcaagaccatctttgcagaacacctcagtgatgagtgccggcgccgattctacaaggactggcacaagagcaagaagaaagccttcaccaaggcctgcaagaggtggcgggacacagacgggaaaaagcagctacagaaggacttcgccgccatgaagaagtactgcaaggtcattcgggtcattgtccacactcagatgaaactgctgcccttccggcagaagaaggcccacatcatggagatccagctgaacggtggcacggtggccgagaaggtggcctgggcccaggcccggctggagaagcaggtgcccgtgcacagcgtgttcagccagagtgaggtcattgatgtcattgctgtcaccaagggtcgaggcgtcaaaggggtcacaagccgctggcataccaagaagctgccgcggaagacccataagggcctgcgcaaggtggcctgcattggcgcctggcaccccgcccgcgtgggctgctccattgctcgggccgggcagaagggctatcaccaccgcacggagctcaacaagaagatcttccgcatcggcaggggcccgcacatggaggacgggaagctggtgaagaacaatgcatccaccagctacgacgtgactgccaagtccatcacaccgctgggtggcttcccccactacggggaagtgaacaacgacttcgtcatgctgaagggttgtattgctggtaccaagaagcgggtcattacgctgagaaagtccctcctggtgcatcacagtcgccaagccgtggagaatattgagctcaagttcattgacaccacctccaagttcggccatggccgcttccagacagcccaagagaagagggccttcatgggcccccaaaagaagcatctggagaaggaaacgccggagacctcgggagacttgtaggctgtgtggggtggatgaaccctgaagcgcaccgcactgtctgccccaatgtctaacaaaggccggaggcgactcttcctgcgaggtctcagagcgctgtgtaaccgcccaaggggttcaccttgcctgctgcctagacaaagccgattcattaagacaggggaattgcaatagagaaagagtaattcacacagagctggctgtgcgggagaccggagttttatgttttattattactcaaatcgatctctttgagcaaaaaaaaaaaaaaaaaaa

SEQ ID NO: 154 - DNA, 1283 bp, Homo sapiens
  source 1..1283: mol_type = genomic DNA
cactcgacctctggcggctagcggcgaggccccttcctgaccttcagggatcggccaccatgtcccaccggaagttttccgcccctcggcacggacacctgggcttcctgccccataagaggagccaccggcaccggggcaaggtgaagacgtggccgcgggatgaccccagccagcccgtgcacctcacggccttcctgggctacaaggcgggcatgacccacaccctgcgggaggtgcaccggccggggctcaaaatttccaaacgggaggaggtggaggcggtgacaattgtagaaacgccgcccctagtggcggtgggcgtggtgggctacgtggccacccctcgaggtctccggagcttcaagaccatctttgcagaacacctcagtgatgagtgccggcgccgattctacaaggactggcacaagagcaagaagaaagccttcaccaaggcctgcaagaggtggcgggacacagacgggaaaaagcagctacagaaggacttcgccgccatgaagaagtactgcaaggtcattcgggtcattgtccacactcagatgaaactgctgcccttccggcagaagaaggcccacatcatggagatccagctgaacggtggcacggtggccgagaaggtggcctgggcccaggcccggctggagaagcaggtgcccgtgcacagcgtgttcagccagagtgaggtcattgatgtcattgctgtcaccaagggtcgaggcgtcaaaggggtcacaagccgctggcataccaagaagctgccgcggaagacccataagggcctgcgcaaggtggcctgcattggcgcctggcaccccgcccgcgtgggctgctccattgctcgggccgggcagaagggctatcaccaccgcacggagctcaacaagaagatcttccgcatcggcaggggcccgcacatggaggacgggaagctggtgaagaacaatgcatccaccagctacgacgtgactgccaagtccatcacaccgctgggtggcttcccccactacggggaagtgaacaacgacttcgtcatgctgaagggttgtattgctggtaccaagaagcgggtcattacgctgagaaagtccctcctggtgcatcacagtcgccaagccgtggagaatattgagctcaagttcattgacaccacctccaagttcggccatggccgcttccagacagcccaagagaagagggccttcatgggcccccaaaagaagcatctggagaaggaaacgccggagacctcgggagacttgtag

SEQ ID NO: 155 - DNA, 2182 bp, Homo sapiens
  source 1..2182: mol_type = genomic DNA
aatctgggaactggcagctgtgagtcctggccctgccactcgacctctggcggctagcggcgaggccccttcctgaccttcagggatcggccaccatgtcccaccggaagttttccgcccctcggcacggacacctgggcttcctgccccataagaggagccaccggcaccggggcaaggtgaagacgtggccgcgggatgaccccagccagcccgtgcacctcacggccttcctgggctacaaggcgggcatgacccacaccctgcgggaggtgcaccggccggggctcaaaatttccaaacgggaggaggtggaggcggtgacaattgtagaaacgccgcccctagtggtggtgggcgtggtgggctacgtggccacccctcgaggtctccggagcttcaagaccatctttgcagaacacctcagtgatgagtgccggcgccgattctacaaggactggcacaagagcaagaagaaagccttcaccaaggcctgcaagaggtggcgggacacagacgggaaaaagcagctacagaaggacttcgccgccatgaagaagtactgcaaggtcattcgggtcattgtccacactcagatgaaactgctgcccttccggcagaagaaggcccacatcatggagatccagctgaacggtggcacggtggccgagaaggtggcctgggcccaggcccggctggagaagcaggtgcccgtgcacagcgtgttcagccagagtgaggtcattgatgtcattgctgtcaccaagggtcgaggcgtcaaaggggtcacaagccgctggcataccaagaagctgccgcggaagacccataagggcctgcgcaaggtggcctgcattggcgcctggcaccccgcccgcgtgggctgctccattgctcgggccgggcagaagggctatcaccaccgcacggagctcaacaagaagatcttccgcatcggcaggggcccgcacatggaggacgggaagctggtgaagaacaatgcatccaccagctacgacgtgactgccaagtccatcacaccgctgggtggcttcccccactacggggaagtgaacaacgacttcgtcatgctgaagggttgtattgctggtaccaagaagcgggtcattacgctgagaaagtccctcctggtgcatcacagtcgccaagccgtggagaatattgagctcaagttcattgacaccacctccaagttcggccatggccgcttccagacagcccaagagaagagggccttcatgggcccccaaaagaagcatctggagaaggaaacgccggagacctcgggagacttgtaggctgtgtggggtggatgaaccctgaagcgcaccgcactgtctgccccaatgtctaacaaaggccggaggcgactcttcctgcgaggtctcagagcgctgtgtaaccgcccaaggggttcaccttgcctgctgcctagacaaagccgattcattaagacaggggaattgcaatagagaaagagtaattcacacagagctggctgtgcgggagaccggagttttatgttttattattactcaaatcgatctctttgagcatttgcggagcagaggttttttttttttttttttttgagagagtcttgatcttgtcgcccaggctgctggagtgccggggagcagagtttttaaggataacttggcgggtggggagagccagtgagccaggagagccgattggtcagggaggaaatcacagggagtcagctgtcttcttgcgctgagtcagctcctgggtggtggccacaagatcagatgagccagtttatcaatctggttggtgccagcagatccatcaagttgcagggtcggcaaaatatctcaagcactgatcttaggggcagcttagggagggtcagaatcttgtagcctccagatgcacgactcctaaaccataattcccaatattgtggctaatgttagtcctaaaaatgcaatctagtccccaggcaaggaggtggtctgctttgggaaagggctgttactgtctttgttttaaactataaactggctgggcgcggtggctcacgcctgtaatcccagcactttgggaggccaagatgggcggatcacctgaggtcgggagttcaagaccagcctggccaacatcgagaaacctcgtctctattaaaaatacaaaatta

SEQ ID NO: 156 - DNA, 575 bp, Homo sapiens
  source 1..575: mol_type = genomic DNA
gaagccagtgagattacgagcccactggcaggatgaacaactccagacgcgcggcgccttaagagctgtaacaccgcgaaggtctgtagcttcattcctgagctagcgagagcgcgaacctaccagaaggaagaaactccgaacacatcggaacatcagaacgagcaaactccggacaccccgcctttaggaactgcaacactcaccgcgagggtccgtggcttcattcttgaagtcagtgagaccaagaactcaccaattccggacacaacaggatctacggtcacagaaactcccaccggaagttttccgcccctcggcacggacacctgggcttcctgccccataagaggagccaccggcaccggggcaaggtgaagacgtggccgcgggatgaccccagccagcccgtgcacctcacggccttcctgggctacaaggcgggcatgacccacaccctgcgggaggtgcaccggccggggctcaaaatttccaaacgggaggaggtggaggcggtgacaattgtagaaacgccgcccctagtggtggtgggcgtggtgggctacgtggccacc

SEQ ID NO: 157 - protein, 407 aa, Homo sapiens
MSHRKFSAPRHGHLGFLPHKRSHRHRGKVKTWPRDDPSQPVHLTAFLGYKAGMTHTLREVHRPGLKISKREEVEAVTIVETPPLVVVGVVGYVATPRGLRSFKTIFAEHLSDECRRRFYKDWHKSKKKAFTKACKRWRDTDGKKQLQKDFAAMKKYCKVIRVIVHTQMKLLPFRQKKAHIMEIQLNGGTVAEKVAWAQARLEKQVPVHSVFSQSEVIDVIAVTKGRGVKGVTSRWHTKKLPRKTHKGLRKVACIGAWHPARVGCSIARAGQKGYHHRTELNKKIFRIGRGPHMEDGKLVKNNASTSYDVTAKSITPLGGFPHYGEVNNDFVMLKGCIAGTKKRVITLRKSLLVHHSRQAVENIELKFIDTTSKFGHGRFQTAQEKRAFMGPQKKHLEKETPETSGDL

SEQ ID NO: 158 - protein, 43 aa, Homo sapiens
MTHTLREVHRPGLKISKREEVEAVTIVETPPLVVVGVVGYVAT

SEQ ID NO: 159 - DNA, 7480 bp, Homo sapiens
  source 1..7480: mol_type = genomic DNA
agatccttgaaagggttttggttttgactgagcagaatggtgccattgcagatcaacacgcactttaaataatcaaaacccctatctttcccctgggaaggaggaagccgaggaaggctgtgtttctgactcacacgggggagtcgggggagtcgtaaacaaccctgaagagaacagccaggcctggtgagtcactcctgggagtggctcctccccaccctgccacgcagcggcaaatgcgggctgggcctaccccctggtggccacgctacctccgcacccggcctctctctgtggcatgggggcggccatgccccttggtggagatgaatgggagtggagctgggctggctgggcaggcaggggcttgcctcttgctgactaaggcagccctggaggggcccgaccatggggcaggaacccagttgccatcctcagagcgaggatcattggccgggctcggggatcagggcctctgtggtcccggcacgcctggcccgtgagactgtactctgcacgactcctccaggtggccagggtcaccggaactggctcgctctcctctgccagttgccggaggtctgggcaccaggccaattctcaccttcccgccagggttaaacattagtgggaggttatcagcgtgggccaggggagggagaggggggaattcaactctgtctcctctgctggagccaccagttcccgcaagcccagacaatgccggtggaggaatttgtggctggctggatctctggtgagacatttttcttccttctgtcacatcacacccaatggtaggtcacttcctcgggaagatgggtgacatgggaggagcagagaccaaagtctgagttccggcctggcgggaggatcacttgagcccaggagtttgagaccagtctgggcaacatagggaggcccctgtctctacaaaaaaatcaaaataattagctgggcatggtggctcacacctgtagtcccagctacttaggaggattgcttgagctcaggagttcaaggctgcagtgagctatgactgcaccactgcactccagcctgggtgacagaatgagaccctgccacaaaaaaaaaaaaaaaaaaaaaaaaagaatcagggcatggtggctcacacctgtaatcccagcactttgcgaggctgaggtaggaggatcacttggggccaggagtttgagaccagcctgggcaacataggaagaccctgtctttataagaaatgagaggctgggcgcggtggctcatgcctgtaagcccagcactttgggaggctgaggtaggtggatcatgaggtcaagatttcgagaccaggctggccaacatggtgaaaccccgtctctactaaaaatacaaaaattagccaggcgcggtggcgcacgcctgtggtcccaactactccagaggctgaggtggaaggagcccttaagctcaggaggttgaagctgcaatgagccatgatcatgccactgcactccagcctggacaacaccagcaagaccctgtgtcaaaaaaaaaaagtctgggttccgtggagcaccccagagccagctgtccccagtcctctggggagtggccgatgggaagaagagaggaaggcacaggtgggagggtgctgcctctgccttccaaggccactctgcctgacacctgcagagggcgggagagccaggtgagcaccctataccttgagccctgctctccaggcccaccctgttgggcttacaaaggaagttcacctttgacctcacctgctgtcctgagtcccctctgggcctctgccccacctggctgtgggccgcagtcccgggccctgaggcctgttgtgctgtggtcccagcccagcttctgggtggcattcctcttaggagaaagagagggacgttctgaacctgcctcctgggggtgcgacctcccccaaactccagaaccagcctctgctgtggagggcagggctaggcagtgggcaggtggaggggaggggagaagctcctctgcaggtgcccaggcatgacccccatcagggccctgcagttctgcgtggccagctggcagcagggcctgctctggatcccggcgacgacattatgagttgaagaaagaagagtaaagctctcggagaggtgggaacctgggtgattctcccagagtcccgcggctcataggcggtgggatacccgggtatgggctccagcgaggacacgtacgtctttggctggctcttccctcttgggtgtgcatcctcaggtggggcctggggtcttagtcccttgtcccagtgccttcctggcccagtgcctgtgtggagggggtggcaggggcagctggagtctctagagcttggcaggaaggtggctgcatgtgtctgagatggccctgctctccttcctcctgcctgaacccctctttcctcttggcacagacttgcttcctgggcctggcacgagggccctcactcatagcaccctcttgtcaccacaggcgctctgggcttggtcctgggacacccgtttgacactgtaaaggtgagtttaggagagctgccagaggaatgaaagatctcacctgacccaaatgtcagggtgccctgagatcaggcctggctaatcttgcctttcctgcctctcctgctggttggcatcccgcttgagggggcagagggaaaggttggcccacctgcccatcccgccaccctacctgctctgtcctcccacccaggtgaggctgcagacccagaccacctaccggggcatcgttgattgcatggtcaagatttaccgccatgagtccgtgagtggcccactcctttggggtccttcccctttcggggaggcatctggggctgttggtaccagcttccctctccagcagggttctgctcctggaggagagaagaccaagtctgggatccttggggggcctgggtggtagcttagcaccccagaggcgcagcctcagcccatccctgcctgtccccacttccctgtggcaggacttgggagcagtttccagccagaggctgccttgccaggggtggagaggacaaaggggaggccccacggtgcctactccgctgccactgtgtctctctgcagctcctgggcttcttcaagggaatgagcttccccattgccagcatagctgtggtcaactctgtcctgtttggggtctatagcaacaccctgctggtgctcacggccacctcccaccaggagcggcgggcccagccgcccagctacatgcacatcttcctagcgggctgcaccggggggttcctgcaggtgagggggcagtgagtgggcacacacaggtgtcatagggatggtcatctcgatctgtcctctcccaccctgccctggcgacccacagctgtggaggcataggcctcttggaggggaacaagaggcctgtgctatggccttccaggctgcaggcctctgggggagggctgtggggaacagagggggcaaaaggcagagacagctggtgggcagtgccaagagggtgctgggagaagcagcctgggccactcgctccagctgacggggcttgcccccctccagaggggtctgccagcctcagagctgtggggagcccactccccaaggagacctttgaccctggagaaccaccagcaccccgcagagctgtgagcccagcccctctggccgggtcctgatgaggtcctgacactcccctggccctgcctggctctacactttgcctgcagtgcttgggtgcccatgacctgggagcctcacctgaggcccagcccagcagggcattaaccattcaggcactgccgtcatctgggctttgggctttagaggggtggatggagggaagagggaccagctgccgccagtgggaaccggtgctgaatgggtcctgtgagcataagcagggagagggtgcgcccggcacccactgacaccccagccgcaagccagggtcgccctctcctgggcagctgcccccagttccttgtcacacttcatggggcagagagcaaggacaaaggacaaagtcaggctgctccttcaaatgaattaatgattaatgagacccccggaggccccggcttttcttctgccccttcttgtgcgaggtgccacctataggtttcctgagccccgcgagccacatcccacaaacacaaggaagagaaccgaagccctaagctaagtggccaggcccggcttctaagtcaccctgcccccccagctctttggaaagcagaagtggggactgtgagggccgctgatggagcctgggtttacagtgaaacctgtggctttagtttaacagagtcttaaaggaaaaatgtgttttagtgtggagtgggaagaagaggcagggactgacagcctctgacgggcacagacgttgccctggtcttcgccgaagctgaccttctgaaatggcatctgacactccaccacccctgtgggggtgtctgtcacctggtgtcagcctagccctgtcctcagcccccaggagctcagggctcagaacacctcctgaagccctgagctcagccctgccagcacgctctagagggtggcacaaggccccatctcccaagggatggtacctaacctacgacccttactcctgggaccaaagtaaacaagcgaagacttggcctgccacaccctaagtaccaccacccaccaccagaggcgaccgccagcccccgtcgccatcagccatctccagggctgaggaactgagcccatgtacctgtcacaaaacaaacaagcaaaaaacagataaatccctcagagacaggctagccttgacatggaccccgattctcacctggactccaaaagctatcttgacctactggcatctctgacccaaatcttaattgcccccatcgccctctacatccccccagcactgaccctcaccaggactccagccccaattccatcccaaatctgtgtagcatctgcttctgccgattctaagagccctagcacctgccaagtccccccattacccaccttcccacactcagaagcctctttggtgggatgctaatgggaaggagtcttgcctctctggaggcaggaggggctggccttgtgcccctccgggcctctgagaggtgggcgcaggagaacagcactcacgaggggacctccttcaccctgggaaagggtggtttctttgctatttcacagtcacaggctgaatccttcacttggccctgcccaccgtacaggtatgctcactgccggctttagggaggccagaaaccaacctgctcctgcaaaaagaatccaggcttgttctgagtgcctgctgtaggccaggcaagttggtcactgttgcatgaggggcagtgcctctcactcttgggcctgatgccaagggaggtggcctgtcccggtcgcatgcagacatcctggccatcccagccacacatgcacgtgagaggctgggtgccggcagggttcctgagggactggaagatgtggccccctgcctgcctccttcctcttgtgaatataaggggccagttcccagcccaaagccccacccggggccctcatgtttcatcaccaacaggcctactgtctggctccttttgacctcatcaaagtccggctacaaaaccagacagagccaagggcccagccagggagccccccaccccggtaccaggggcccgtgcactgtgcagcctccatcttccgggaggaggggccccgggggctgttccgaggagcctgggccctgacgctgagggacacccccacggtggggatctacttcatcacctatgaagggctctgtcgccagtacacaccagaaggccagaatcccagtaagtaaagtggcgtgagaggatgggggacagaggtgtgggtagcaggcagggtccagcggggactggggaaggaaactagggtctggggaggatgctctgttctgggtctgacccctgctctgggctctctctgccccaggctcagccacggtgctggtggcagggggctttgcaggcattgcttcctgggtggcagccacgcccttagacatgatcaagtcccggatgcagatggatggactgagacgcagagtgtaccaggggatgctggactgcatggtgagcagcatccggcaggaaggactgggagtcttcttccggggggtcaccatcaacagtgcccgcgcctttcccgtcaatgctgtcaccttcctcagctacgaatatctcctccgctggtggggatgagccctgcggcaatgccagcagctccccatcaggcccacggcctggaggccagtttgagattggaggccaggttgaaagcttgcaaatcagtgcaagaggctcagcccttcctaaccaaggtgcctcccacccgcgcagatctgggctgggcagacacctgtgggagccggaagccagggggcctgtgcagcctccctgtgtagctggccttgactcctttgcctcccacatctgtgaaacagggagcatgaggcacaagtgagctggcaagtggtgctggtgacatcccagctcctgtcctgtgccttcacctctttttttttttttttttttttttgagatggagtctttctctgtcacccaggctggaatgcagtggcgtgatctcggctcactgcaacctccgcctttccaccttccgggttcaagcaactctcctgcctcagcctcccaagtagctgggactataggcgcccgccaccacacccagctaaatttttgtatttttagtagagacagggtttcaccatgtcagccaggatggtcttgatctcctgactttgtgatccgcccgcgtcggcctctcaaagtgctgggattacaggcgtgagccaccgcgcccggctgccttcacctcttaaggagctctgagactccacttctgagagtccctgcggcctcccacctccctgcctttcaaagctctctcccccatgacccaggataaccctatgtctcctcccccagaatccttcagtggctctcatcaccttcaggaaaagcccaaactccttccaccctccaggttcctccctccccacgaggctttgttctcctggggttgcttcctggaccctgaacaagttgtgctctcattggccgggcctggccagcagtgcacagtgcctggcaggttgactctaccatccccggggctggccccgctctcctccgagacccaggctgagcccagtcccctcacccttccttgacttacctccccacctgaggctgactttggggttcccagacaccctacccacacacatgccttgatcatagcacttgcctgcgcttcttcagagtcattaatttgcttctcggcttccccactggactgtgagctgcctgaggtcagggattgcgctttggatggtttccagcctgagcctggtgcttgaacagacgtgtgcaataaatgctcgttaaatgatg

SEQ ID NO: 160 - RNA, 2209 nt, Homo sapiens
  source 1..2209: mol_type = other RNA
acccctatctttcccctgggaaggaggaagccgaggaaggctgtgtttctgactcacacgggggagtcgggggagtcgtaaacaaccctgaagagaacagccaggcctgttcccgcaagcccagacaatgccggtggaggaatttgtggctggctggatctctggcgctctgggcttggtcctgggacacccgtttgacactgtaaaggtgaggctgcagacccagaccacctaccggggcatcgttgattgcatggtcaagatttaccgccatgagtccctcctgggcttcttcaagggaatgagcttccccattgccagcatagctgtggtcaactctgtcctgtttggggtctatagcaacaccctgctggtgctcacggccacctcccaccaggagcggcgggcccagccgcccagctacatgcacatcttcctagcgggctgcaccggggggttcctgcaggcctactgtctggctccttttgacctcatcaaagtccggctacaaaaccagacagagccaagggcccagccagggagccccccaccccggtaccaggggcccgtgcactgtgcagcctccatcttccgggaggaggggccccgggggctgttccgaggagcctgggccctgacgctgagggacacccccacggtggggatctacttcatcacctatgaagggctctgtcgccagtacacaccagaaggccagaatcccagctcagccacggtgctggtggcagggggctttgcaggcattgcttcctgggtggcagccacgcccttagacatgatcaagtcccggatgcagatggatggactgagacgcagagtgtaccaggggatgctggactgcatggtgagcagcatccggcaggaaggactgggagtcttcttccggggggtcaccatcaacagtgcccgcgcctttcccgtcaatgctgtcaccttcctcagctacgaatatctcctccgctggtggggatgagccctgcggcaatgccagcagctccccatcaggcccacggcctggaggccagtttgagattggaggccaggttgaaagcttgcaaatcagtgcaagaggctcagcccttcctaaccaaggtgcctcccacccgcgcagatctgggctgggcagacacctgtgggagccggaagccagggggcctgtgcagcctccctgtgtagctggccttgactcctttgcctcccacatctgtgaaacagggagcatgaggcacaagtgagctggcaagtggtgctggtgacatcccagctcctgtcctgtgccttcacctctttttttttttttttttttttttgagatggagtctttctctgtcacccaggctggaatgcagtggcgtgatctcggctcactgcaacctccgcctttccaccttccgggttcaagcaactctcctgcctcagcctcccaagtagctgggactataggcgcccgccaccacacccagctaaatttttgtatttttagtagagacagggtttcaccatgtcagccaggatggtcttgatctcctgactttgtgatccgcccgcgtcggcctctcaaagtgctgggattacaggcgtgagccaccgcgcccggctgccttcacctcttaaggagctctgagactccacttctgagagtccctgcggcctcccacctccctgcctttcaaagctctctcccccatgacccaggataaccctatgtctcctcccccagaatccttcagtggctctcatcaccttcaggaaaagcccaaactccttccaccctccaggttcctccctccccacgaggctttgttctcctggggttgcttcctggaccctgaacaagttgtgctctcattggccgggcctggccagcagtgcacagtgcctggcaggttgactctaccatccccggggctggccccgctctcctccgagacccaggctgagcccagtcccctcacccttccttgacttacctccccacctgaggctgactttggggttcccagacaccctacccacacacatgccttgatcatagcacttgcctgcgcttcttcagagtcattaatttgcttctcggcttccccactggactgtgagctgcctgaggtcagggattgcgctttggatggtttccagcctgagcctggtgcttgaacagacgtgtgcaataaatgctcgttaaatgatg

SEQ ID NO: 161 - RNA, 894 nt, Homo sapiens
  source 1..894: mol_type = other RNA
atgccggtggaggaatttgtggctggctggatctctggcgctctgggcttggtcctgggacacccgtttgacactgtaaaggtgaggctgcagacccagaccacctaccggggcatcgttgattgcatggtcaagatttaccgccatgagtccgcctactgtctggctccttttgacctcatcaaagtccggctacaaaaccagacagagccaagggcccagccagggagccccccaccccggtaccaggggcccgtgcactgtgcagcctccatcttccgggaggaggggccccgggggctgttccgaggagcctgggccctgacgctgagggacacccccacggtggggatctacttcatcacctatgaagggctctgtcgccagtacacaccagaaggccagaatcccagctcagccacggtgctggtggcagggggctttgcaggcattgcttcctgggtggcagccacgcccttagacatgatcaagtcccggatgcagatggatggactgagacgcagagtgtaccaggggatgctggactgcatggtgagcagcatccggcaggaaggactgggagtcttcttccggggggtcaccatcaacagtgcccgcgcctttcccgtcaatgctgtcaccttcctcagctacgaatatctcctccgctggtggggatgagccctgcggcaatgccagcagctccccatcaggcccacggcctggaggccagtttgagattggaggccaggttgaaagcttgcaaatcagtgcaagaggctcagcccttcctaaccaaggtgcctcccacccgcgcagatctgggctgggcagacacctgtgggagccggaagccagggggcctgtgcagcctccctgtgtagctggccttga

SEQ ID NO: 162 - RNA, 2138 nt, Homo sapiens
  source 1..2138: mol_type = other RNA
ggggaattcaactctgtctcctctgctggagccaccagttcccgcaagcccagacaatgccggtggaggaatttgtggctggctggatctctggcgctctgggcttggtcctgggacacccgtttgacactgtaaaggtgaggctgcagacccagaccacctaccggggcatcgttgattgcatggtcaagatttaccgccatgagtccctcctgggcttcttcaagggaatgagcttccccattgccagcatagctgtggtcaactctgtcctgtttggggtctatagcaacaccctgctggtgctcacggccacctcccaccaggagcggcgggcccagccgcccagctacatgcacatcttcctagcgggctgcaccggggggttcctgcaggcctactgtctggctccttttgacctcatcaaagtccggctacaaaaccagacagagccaagggcccagccagggagccccccaccccggtaccaggggcccgtgcactgtgcagcctccatcttccgggaggaggggccccgggggctgttccgaggagcctgggccctgacgctgagggacacccccacggtggggatctacttcatcacctatgaagggctctgtcgccagtacacaccagaaggccagaatcccagctcagccacggtgctggtggcagggggctttgcaggcattgcttcctgggtggcagccacgcccttagacatgatcaagtcccggatgcagatggatggactgagacgcagagtgtaccaggggatgctggactgcatggtgagcagcatccggcaggaaggactgggagtcttcttccggggggtcaccatcaacagtgcccgcgcctttcccgtcaatgctgtcaccttcctcagctacgaatatctcctccgctggtggggatgagccctgcggcaatgccagcagctccccatcaggcccacggcctggaggccagtttgagattggaggccaggttgaaagcttgcaaatcagtgcaagaggctcagcccttcctaaccaaggtgcctcccacccgcgcagatctgggctgggcagacacctgtgggagccggaagccagggggcctgtgcagcctccctgtgtagctggccttgactcctttgcctcccacatctgtgaaacagggagcatgaggcacaagtgagctggcaagtggtgctggtgacatcccagctcctgtcctgtgccttcacctctttttttttttttttttttttttgagatggagtctttctctgtcacccaggctggaatgcagtggcgtgatctcggctcactgcaacctccgcctttccaccttccgggttcaagcaactctcctgcctcagcctcccaagtagctgggactataggcgcccgccaccacacccagctaaatttttgtatttttagtagagacagggtttcaccatgtcagccaggatggtcttgatctcctgactttgtgatccgcccgcgtcggcctctcaaagtgctgggattacaggcgtgagccaccgcgcccggctgccttcacctcttaaggagctctgagactccacttctgagagtccctgcggcctcccacctccctgcctttcaaagctctctcccccatgacccaggataaccctatgtctcctcccccagaatccttcagtggctctcatcaccttcaggaaaagcccaaactccttccaccctccaggttcctccctccccacgaggctttgttctcctggggttgcttcctggaccctgaacaagttgtgctctcattggccgggcctggccagcagtgcacagtgcctggcaggttgactctaccatccccggggctggccccgctctcctccgagacccaggctgagcccagtcccctcacccttccttgacttacctccccacctgaggctgactttggggttcccagacaccctacccacacacatgccttgatcatagcacttgcctgcgcttcttcagagtcattaatttgcttctcggcttccccactggactgtgagctgcctgaggtcagggattgcgctttggatggtttccagcctgagcctggtgcttgaacagacgtgtgcaataaatgctcgttaaatgatg

SEQ ID NO: 163 - RNA, 2432 nt, Homo sapiens
  source 1..2432: mol_type = other RNA
atgggggcggccatgccccttggtggagatgaatgggagtggagctgggctggctgggcaggcaggggcttgcctcttgctgactaaggcagccctggaggggcccgaccatggggcaggaacccagttgccatcctcagagcgaggatcattggccgggctcggggatcagggcctctgtggtcccggcacgcctggcccgtgagactgtactctgcacgactcctccaggtggccagggtcaccggaactggctcgctctcctctgccagttgccggaggtctgggcaccaggccaattctcaccttcccgccagggttaaacattagtgggaggttatcagcgtgggccaggggagggagaggggggaattcaactctgtctcctctgctggagccaccagttcccgcaagcccagacaatgccggtggaggaatttgtggctggctggatctctggcgctctgggcttggtcctgggacacccgtttgacactgtaaagctcctgggcttcttcaagggaatgagcttccccattgccagcatagctgtggtcaactctgtcctgtttggggtctatagcaacaccctgctggtgctcacggccacctcccaccaggagcggcgggcccagccgcccagctacatgcacatcttcctagcgggctgcaccggggggttcctgcaggcctactgtctggctccttttgacctcatcaaagtccggctacaaaaccagacagagccaagggcccagccagggagccccccaccccggtaccaggggcccgtgcactgtgcagcctccatcttccgggaggaggggccccgggggctgttccgaggagcctgggccctgacgctgagggacacccccacggtggggatctacttcatcacctatgaagggctctgtcgccagtacacaccagaaggccagaatcccagctcagccacggtgctggtggcagggggctttgcaggcattgcttcctgggtggcagccacgcccttagacatgatcaagtcccggatgcagatggatggactgagacgcagagtgtaccaggggatgctggactgcatggtgagcagcatccggcaggaaggactgggagtcttcttccggggggtcaccatcaacagtgcccgcgcctttcccgtcaatgctgtcaccttcctcagctacgaatatctcctccgctggtggggatgagccctgcggcaatgccagcagctccccatcaggcccacggcctggaggccagtttgagattggaggccaggttgaaagcttgcaaatcagtgcaagaggctcagcccttcctaaccaaggtgcctcccacccgcgcagatctgggctgggcagacacctgtgggagccggaagccagggggcctgtgcagcctccctgtgtagctggccttgactcctttgcctcccacatctgtgaaacagggagcatgaggcacaagtgagctggcaagtggtgctggtgacatcccagctcctgtcctgtgccttcacctctttttttttttttttttttttttgagatggagtctttctctgtcacccaggctggaatgcagtggcgtgatctcggctcactgcaacctccgcctttccaccttccgggttcaagcaactctcctgcctcagcctcccaagtagctgggactataggcgcccgccaccacacccagctaaatttttgtatttttagtagagacagggtttcaccatgtcagccaggatggtcttgatctcctgactttgtgatccgcccgcgtcggcctctcaaagtgctgggattacaggcgtgagccaccgcgcccggctgccttcacctcttaaggagctctgagactccacttctgagagtccctgcggcctcccacctccctgcctttcaaagctctctcccccatgacccaggataaccctatgtctcctcccccagaatccttcagtggctctcatcaccttcaggaaaagcccaaactccttccaccctccaggttcctccctccccacgaggctttgttctcctggggttgcttcctggaccctgaacaagttgtgctctcattggccgggcctggccagcagtgcacagtgcctggcaggttgactctaccatccccggggctggccccgctctcctccgagacccaggctgagcccagtcccctcacccttccttgacttacctccccacctgaggctgactttggggttcccagacaccctacccacacacatgccttgatcatagcacttgcctgcgcttcttcagagtcattaatttgcttctcggcttccccactggactgtgagctgcctgaggtcagggattgcgctttggatggtttccagcctgagcctggtgcttgaacagacgtgtgcaataaatgctcgttaaatgatg

SEQ ID NO: 164 - RNA, 2286 nt, Homo sapiens
  source 1..2286: mol_type = other RNA
agatccttgaaagggttttggttttgactgagcagaatggtgccattgcagatcaacacgcactttaaataatcaaaacccctatctttcccctgggaaggaggaagccgaggaaggctgtgtttctgactcacacgggggagtcgggggagtcgtaaacaaccctgaagagaacagccaggcctgttcccgcaagcccagacaatgccggtggaggaatttgtggctggctggatctctggcgctctgggcttggtcctgggacacccgtttgacactgtaaaggtgaggctgcagacccagaccacctaccggggcatcgttgattgcatggtcaagatttaccgccatgagtccctcctgggcttcttcaagggaatgagcttccccattgccagcatagctgtggtcaactctgtcctgtttggggtctatagcaacaccctgctggtgctcacggccacctcccaccaggagcggcgggcccagccgcccagctacatgcacatcttcctagcgggctgcaccggggggttcctgcaggcctactgtctggctccttttgacctcatcaaagtccggctacaaaaccagacagagccaagggcccagccagggagccccccaccccggtaccaggggcccgtgcactgtgcagcctccatcttccgggaggaggggccccgggggctgttccgaggagcctgggccctgacgctgagggacacccccacggtggggatctacttcatcacctatgaagggctctgtcgccagtacacaccagaaggccagaatcccagctcagccacggtgctggtggcagggggctttgcaggcattgcttcctgggtggcagccacgcccttagacatgatcaagtcccggatgcagatggatggactgagacgcagagtgtaccaggggatgctggactgcatggtgagcagcatccggcaggaaggactgggagtcttcttccggggggtcaccatcaacagtgcccgcgcctttcccgtcaatgctgtcaccttcctcagctacgaatatctcctccgctggtggggatgagccctgcggcaatgccagcagctccccatcaggcccacggcctggaggccagtttgagattggaggccaggttgaaagcttgcaaatcagtgcaagaggctcagcccttcctaaccaaggtgcctcccacccgcgcagatctgggctgggcagacacctgtgggagccggaagccagggggcctgtgcagcctccctgtgtagctggccttgactcctttgcctcccacatctgtgaaacagggagcatgaggcacaagtgagctggcaagtggtgctggtgacatcccagctcctgtcctgtgccttcacctctttttttttttttttttttttttgagatggagtctttctctgtcacccaggctggaatgcagtggcgtgatctcggctcactgcaacctccgcctttccaccttccgggttcaagcaactctcctgcctcagcctcccaagtagctgggactataggcgcccgccaccacacccagctaaatttttgtatttttagtagagacagggtttcaccatgtcagccaggatggtcttgatctcctgactttgtgatccgcccgcgtcggcctctcaaagtgctgggattacaggcgtgagccaccgcgcccggctgccttcacctcttaaggagctctgagactccacttctgagagtccctgcggcctcccacctccctgcctttcaaagctctctcccccatgacccaggataaccctatgtctcctcccccagaatccttcagtggctctcatcaccttcaggaaaagcccaaactccttccaccctccaggttcctccctccccacgaggctttgttctcctggggttgcttcctggaccctgaacaagttgtgctctcattggccgggcctggccagcagtgcacagtgcctggcaggttgactctaccatccccggggctggccccgctctcctccgagacccaggctgagcccagtcccctcacccttccttgacttacctccccacctgaggctgactttggggttcccagacaccctacccacacacatgccttgatcatagcacttgcctgcgcttcttcagagtcattaatttgcttctcggcttccccactggactgtgagctgcctgaggtcagggattgcgctttggatggtttccagcctgagcctggtgcttgaacagacgtgtgcaataaatgctcgttaaatgatg

SEQ ID NO: 165 - RNA, 2196 nt, Homo sapiens
  source 1..2196: mol_type = other RNA
agaatggtgccattgcagatcaacacgcactttaaataatcaaaacccctatctttcccctgggaaggaggaagccgaggaaggctgtgtttctgactcacacgggggagtcgggggagtcgtaaacaaccctgaagagaacagccaggcctggcgctctgggcttggtcctgggacacccgtttgacactgtaaaggtgaggctgcagacccagaccacctaccggggcatcgttgattgcatggtcaagatttaccgccatgagtccctcctgggcttcttcaagggaatgagcttccccattgccagcatagctgtggtcaactctgtcctgtttggggtctatagcaacaccctgctggtgctcacggccacctcccaccaggagcggcgggcccagccgcccagctacatgcacatcttcctagcgggctgcaccggggggttcctgcaggcctactgtctggctccttttgacctcatcaaagtccggctacaaaaccagacagagccaagggcccagccagggagccccccaccccggtaccaggggcccgtgcactgtgcagcctccatcttccgggaggaggggccccgggggctgttccgaggagcctgggccctgacgctgagggacacccccacggtggggatctacttcatcacctatgaagggctctgtcgccagtacacaccagaaggccagaatcccagctcagccacggtgctggtggcagggggctttgcaggcattgcttcctgggtggcagccacgcccttagacatgatcaagtcccggatgcagatggatggactgagacgcagagtgtaccaggggatgctggactgcatggtgagcagcatccggcaggaaggactgggagtcttcttccggggggtcaccatcaacagtgcccgcgcctttcccgtcaatgctgtcaccttcctcagctacgaatatctcctccgctggtggggatgagccctgcggcaatgccagcagctccccatcaggcccacggcctggaggccagtttgagattggaggccaggttgaaagcttgcaaatcagtgcaagaggctcagcccttcctaaccaaggtgcctcccacccgcgcagatctgggctgggcagacacctgtgggagccggaagccagggggcctgtgcagcctccctgtgtagctggccttgactcctttgcctcccacatctgtgaaacagggagcatgaggcacaagtgagctggcaagtggtgctggtgacatcccagctcctgtcctgtgccttcacctctttttttttttttttttttttttgagatggagtctttctctgtcacccaggctggaatgcagtggcgtgatctcggctcactgcaacctccgcctttccaccttccgggttcaagcaactctcctgcctcagcctcccaagtagctgggactataggcgcccgccaccacacccagctaaatttttgtatttttagtagagacagggtttcaccatgtcagccaggatggtcttgatctcctgactttgtgatccgcccgcgtcggcctctcaaagtgctgggattacaggcgtgagccaccgcgcccggctgccttcacctcttaaggagctctgagactccacttctgagagtccctgcggcctcccacctccctgcctttcaaagctctctcccccatgacccaggataaccctatgtctcctcccccagaatccttcagtggctctcatcaccttcaggaaaagcccaaactccttccaccctccaggttcctccctccccacgaggctttgttctcctggggttgcttcctggaccctgaacaagttgtgctctcattggccgggcctggccagcagtgcacagtgcctggcaggttgactctaccatccccggggctggccccgctctcctccgagacccaggctgagcccagtcccctcacccttccttgacttacctccccacctgaggctgactttggggttcccagacaccctacccacacacatgccttgatcatagcacttgcctgcgcttcttcagagtcattaatttgcttctcggcttccccactggactgtgagctgcctgaggtcagggattgcgctttggatggtttccagcctgagcctggtgcttgaacagacgtgtgcaataaatgctcgttaaatga

SEQ ID NO: 166 - RNA, 1975 nt, Homo sapiens
  source 1..1975: mol_type = other RNA
agttcccgcaagcccagacaatgccggtggaggaatttgtggctggctggatctctgacttgcttcctgggcctggcacgagggccctcactcatagcaccctcttgtcaccacaggcgctctgggcttggtcctgggacacccgtttgacactgtaaaggtgaggctgcagacccagaccacctaccggggcatcgttgattgcatggtcaagatttaccgccatgagtccgcctactgtctggctccttttgacctcatcaaagtccggctacaaaaccagacagagccaagggcccagccagggagccccccaccccggtaccaggggcccgtgcactgtgcagcctccatcttccgggaggaggggccccgggggctgttccgaggagcctgggccctgacgctgagggacacccccacggtggggatctacttcatcacctatgaagggctctgtcgccagtacacaccagaaggccagaatcccagctcagccacggtgctggtggcagggggctttgcaggcattgcttcctgggtggcagccacgcccttagacatgatcaagtcccggatgcagatggatggactgagacgcagagtgtaccaggggatgctggactgcatggtgagcagcatccggcaggaaggactgggagtcttcttccggggggtcaccatcaacagtgcccgcgcctttcccgtcaatgctgtcaccttcctcagctacgaatatctcctccgctggtggggatgagccctgcggcaatgccagcagctccccatcaggcccacggcctggaggccagtttgagattggaggccaggttgaaagcttgcaaatcagtgcaagaggctcagcccttcctaaccaaggtgcctcccacccgcgcagatctgggctgggcagacacctgtgggagccggaagccagggggcctgtgcagcctccctgtgtagctggccttgactcctttgcctcccacatctgtgaaacagggagcatgaggcacaagtgagctggcaagtggtgctggtgacatcccagctcctgtcctgtgccttcacctctttttttttttttttttttttttgagatggagtctttctctgtcacccaggctggaatgcagtggcgtgatctcggctcactgcaacctccgcctttccaccttccgggttcaagcaactctcctgcctcagcctcccaagtagctgggactataggcgcccgccaccacacccagctaaatttttgtatttttagtagagacagggtttcaccatgtcagccaggatggtcttgatctcctgactttgtgatccgcccgcgtcggcctctcaaagtgctgggattacaggcgtgagccaccgcgcccggctgccttcacctcttaaggagctctgagactccacttctgagagtccctgcggcctcccacctccctgcctttcaaagctctctcccccatgacccaggataaccctatgtctcctcccccagaatccttcagtggctctcatcaccttcaggaaaagcccaaactccttccaccctccaggttcctccctccccacgaggctttgttctcctggggttgcttcctggaccctgaacaagttgtgctctcattggccgggcctggccagcagtgcacagtgcctggcaggttgactctaccatccccggggctggccccgctctcctccgagacccaggctgagcccagtcccctcacccttccttgacttacctccccacctgaggctgactttggggttcccagacaccctacccacacacatgccttgatcatagcacttgcctgcgcttcttcagagtcattaatttgcttctcggcttccccactggactgtgagctgcctgaggtcagggattgcgctttggatggtttccagcctgagcctggtgcttgaacagacgtgtgcaataaatgctcgttaaatgatg

SEQ ID NO: 167 - RNA, 2102 nt, Homo sapiens
  source 1..2102: mol_type = other RNA
agttcccgcaagcccagacaatgccggtggaggaatttgtggctggctggatctctggcgctctgggcttggtcctgggacacccgtttgacactgtaaaggtgaggctgcagacccagaccacctaccggggcatcgttgattgcatggtcaagatttaccgccatgagtccctcctgggcttcttcaagggaatgagcttccccattgccagcatagctgtggtcaactctgtcctgtttggggtctatagcaacaccctgctggtgctcacggccacctcccaccaggagcggcgggcccagccgcccagctacatgcacatcttcctagcgggctgcaccggggggttcctgcaggcctactgtctggctccttttgacctcatcaaagtccggctacaaaaccagacagagccaagggcccagccagggagccccccaccccggtaccaggggcccgtgcactgtgcagcctccatcttccgggaggaggggccccgggggctgttccgaggagcctgggccctgacgctgagggacacccccacggtggggatctacttcatcacctatgaagggctctgtcgccagtacacaccagaaggccagaatcccagctcagccacggtgctggtggcagggggctttgcaggcattgcttcctgggtggcagccacgcccttagacatgatcaagtcccggatgcagatggatggactgagacgcagagtgtaccaggggatgctggactgcatggtgagcagcatccggcaggaaggactgggagtcttcttccggggggtcaccatcaacagtgcccgcgcctttcccgtcaatgctgtcaccttcctcagctacgaatatctcctccgctggtggggatgagccctgcggcaatgccagcagctccccatcaggcccacggcctggaggccagtttgagattggaggccaggttgaaagcttgcaaatcagtgcaagaggctcagcccttcctaaccaaggtgcctcccacccgcgcagatctgggctgggcagacacctgtgggagccggaagccagggggcctgtgcagcctccctgtgtagctggccttgactcctttgcctcccacatctgtgaaacagggagcatgaggcacaagtgagctggcaagtggtgctggtgacatcccagctcctgtcctgtgccttcacctctttttttttttttttttttttttgagatggagtctttctctgtcacccaggctggaatgcagtggcgtgatctcggctcactgcaacctccgcctttccaccttccgggttcaagcaactctcctgcctcagcctcccaagtagctgggactataggcgcccgccaccacacccagctaaatttttgtatttttagtagagacagggtttcaccatgtcagccaggatggtcttgatctcctgactttgtgatccgcccgcgtcggcctctcaaagtgctgggattacaggcgtgagccaccgcgcccggctgccttcacctcttaaggagctctgagactccacttctgagagtccctgcggcctcccacctccctgcctttcaaagctctctcccccatgacccaggataaccctatgtctcctcccccagaatccttcagtggctctcatcaccttcaggaaaagcccaaactccttccaccctccaggttcctccctccccacgaggctttgttctcctggggttgcttcctggaccctgaacaagttgtgctctcattggccgggcctggccagcagtgcacagtgcctggcaggttgactctaccatccccggggctggccccgctctcctccgagacccaggctgagcccagtcccctcacccttccttgacttacctccccacctgaggctgactttggggttcccagacaccctacccacacacatgccttgatcatagcacttgcctgcgcttcttcagagtcattaatttgcttctcggcttccccactggactgtgagctgcctgaggtcagggattgcgctttggatggtttccagcctgagcctggtgcttgaacagacgtgtgcaataaatgctcgttaaatgatg

SEQ ID NO: 168 - RNA, 1916 nt, Homo sapiens
  source 1..1916: mol_type = other RNA
agttcccgcaagcccagacaatgccggtggaggaatttgtggctggctggatctctggcgctctgggcttggtcctgggacacccgtttgacactgtaaaggtgaggctgcagacccagaccacctaccggggcatcgttgattgcatggtcaagatttaccgccatgagtccgcctactgtctggctccttttgacctcatcaaagtccggctacaaaaccagacagagccaagggcccagccagggagccccccaccccggtaccaggggcccgtgcactgtgcagcctccatcttccgggaggaggggccccgggggctgttccgaggagcctgggccctgacgctgagggacacccccacggtggggatctacttcatcacctatgaagggctctgtcgccagtacacaccagaaggccagaatcccagctcagccacggtgctggtggcagggggctttgcaggcattgcttcctgggtggcagccacgcccttagacatgatcaagtcccggatgcagatggatggactgagacgcagagtgtaccaggggatgctggactgcatggtgagcagcatccggcaggaaggactgggagtcttcttccggggggtcaccatcaacagtgcccgcgcctttcccgtcaatgctgtcaccttcctcagctacgaatatctcctccgctggtggggatgagccctgcggcaatgccagcagctccccatcaggcccacggcctggaggccagtttgagattggaggccaggttgaaagcttgcaaatcagtgcaagaggctcagcccttcctaaccaaggtgcctcccacccgcgcagatctgggctgggcagacacctgtgggagccggaagccagggggcctgtgcagcctccctgtgtagctggccttgactcctttgcctcccacatctgtgaaacagggagcatgaggcacaagtgagctggcaagtggtgctggtgacatcccagctcctgtcctgtgccttcacctctttttttttttttttttttttttgagatggagtctttctctgtcacccaggctggaatgcagtggcgtgatctcggctcactgcaacctccgcctttccaccttccgggttcaagcaactctcctgcctcagcctcccaagtagctgggactataggcgcccgccaccacacccagctaaatttttgtatttttagtagagacagggtttcaccatgtcagccaggatggtcttgatctcctgactttgtgatccgcccgcgtcggcctctcaaagtgctgggattacaggcgtgagccaccgcgcccggctgccttcacctcttaaggagctctgagactccacttctgagagtccctgcggcctcccacctccctgcctttcaaagctctctcccccatgacccaggataaccctatgtctcctcccccagaatccttcagtggctctcatcaccttcaggaaaagcccaaactccttccaccctccaggttcctccctccccacgaggctttgttctcctggggttgcttcctggaccctgaacaagttgtgctctcattggccgggcctggccagcagtgcacagtgcctggcaggttgactctaccatccccggggctggccccgctctcctccgagacccaggctgagcccagtcccctcacccttccttgacttacctccccacctgaggctgactttggggttcccagacaccctacccacacacatgccttgatcatagcacttgcctgcgcttcttcagagtcattaatttgcttctcggcttccccactggactgtgagctgcctgaggtcagggattgcgctttggatggtttccagcctgagcctggtgcttgaacagacgtgtgcaataaatgctcgttaaatgatg

SEQ ID NO: 169 - RNA, 2030 nt, Homo sapiens
  source 1..2030: mol_type = other RNA
agttcccgcaagcccagacaatgccggtggaggaatttgtggctggctggatctctggcgctctgggcttggtcctgggacacccgtttgacactgtaaagctcctgggcttcttcaagggaatgagcttccccattgccagcatagctgtggtcaactctgtcctgtttggggtctatagcaacaccctgctggtgctcacggccacctcccaccaggagcggcgggcccagccgcccagctacatgcacatcttcctagcgggctgcaccggggggttcctgcaggcctactgtctggctccttttgacctcatcaaagtccggctacaaaaccagacagagccaagggcccagccagggagccccccaccccggtaccaggggcccgtgcactgtgcagcctccatcttccgggaggaggggccccgggggctgttccgaggagcctgggccctgacgctgagggacacccccacggtggggatctacttcatcacctatgaagggctctgtcgccagtacacaccagaaggccagaatcccagctcagccacggtgctggtggcagggggctttgcaggcattgcttcctgggtggcagccacgcccttagacatgatcaagtcccggatgcagatggatggactgagacgcagagtgtaccaggggatgctggactgcatggtgagcagcatccggcaggaaggactgggagtcttcttccggggggtcaccatcaacagtgcccgcgcctttcccgtcaatgctgtcaccttcctcagctacgaatatctcctccgctggtggggatgagccctgcggcaatgccagcagctccccatcaggcccacggcctggaggccagtttgagattggaggccaggttgaaagcttgcaaatcagtgcaagaggctcagcccttcctaaccaaggtgcctcccacccgcgcagatctgggctgggcagacacctgtgggagccggaagccagggggcctgtgcagcctccctgtgtagctggccttgactcctttgcctcccacatctgtgaaacagggagcatgaggcacaagtgagctggcaagtggtgctggtgacatcccagctcctgtcctgtgccttcacctctttttttttttttttttttttttgagatggagtctttctctgtcacccaggctggaatgcagtggcgtgatctcggctcactgcaacctccgcctttccaccttccgggttcaagcaactctcctgcctcagcctcccaagtagctgggactataggcgcccgccaccacacccagctaaatttttgtatttttagtagagacagggtttcaccatgtcagccaggatggtcttgatctcctgactttgtgatccgcccgcgtcggcctctcaaagtgctgggattacaggcgtgagccaccgcgcccggctgccttcacctcttaaggagctctgagactccacttctgagagtccctgcggcctcccacctccctgcctttcaaagctctctcccccatgacccaggataaccctatgtctcctcccccagaatccttcagtggctctcatcaccttcaggaaaagcccaaactccttccaccctccaggttcctccctccccacgaggctttgttctcctggggttgcttcctggaccctgaacaagttgtgctctcattggccgggcctggccagcagtgcacagtgcctggcaggttgactctaccatccccggggctggccccgctctcctccgagacccaggctgagcccagtcccctcacccttccttgacttacctccccacctgaggctgactttggggttcccagacaccctacccacacacatgccttgatcatagcacttgcctgcgcttcttcagagtcattaatttgcttctcggcttccccactggactgtgagctgcctgaggtcagggattgcgctttggatggtttccagcctgagcctggtgcttgaacagacgtgtgcaataaatgctcgttaaatgatg

SEQ ID NO: 170 - RNA, 2320 nt, Homo sapiens
  source 1..2320: mol_type = other RNA
gactgagcagaatggtgccattgcagatcaacacgcactttaaataatcaaaacccctatctttcccctgggaaggaggaagccgaggaaggctgtgtttctgactcacacgggggagtcgggggagtcgtaaacaaccctgaagagaacagccaggcctgttcccgcaagcccagacaatgccggtggaggaatttgtggctggctggatctctgacttgcttcctgggcctggcacgagggccctcactcatagcaccctcttgtcaccacaggcgctctgggcttggtcctgggacacccgtttgacactgtaaaggtgaggctgcagacccagaccacctaccggggcatcgttgattgcatggtcaagatttaccgccatgagtccctcctgggcttcttcaagggaatgagcttccccattgccagcatagctgtggtcaactctgtcctgtttggggtctatagcaacaccctgctggtgctcacggccacctcccaccaggagcggcgggcccagccgcccagctacatgcacatcttcctagcgggctgcaccggggggttcctgcaggcctactgtctggctccttttgacctcatcaaagtccggctacaaaaccagacagagccaagggcccagccagggagccccccaccccggtaccaggggcccgtgcactgtgcagcctccatcttccgggaggaggggccccgggggctgttccgaggagcctgggccctgacgctgagggacacccccacggtggggatctacttcatcacctatgaagggctctgtcgccagtacacaccagaaggccagaatcccagctcagccacggtgctggtggcagggggctttgcaggcattgcttcctgggtggcagccacgcccttagacatgatcaagtcccggatgcagatggatggactgagacgcagagtgtaccaggggatgctggactgcatggtgagcagcatccggcaggaaggactgggagtcttcttccggggggtcaccatcaacagtgcccgcgcctttcccgtcaatgctgtcaccttcctcagctacgaatatctcctccgctggtggggatgagccctgcggcaatgccagcagctccccatcaggcccacggcctggaggccagtttgagattggaggccaggttgaaagcttgcaaatcagtgcaagaggctcagcccttcctaaccaaggtgcctcccacccgcgcagatctgggctgggcagacacctgtgggagccggaagccagggggcctgtgcagcctccctgtgtagctggccttgactcctttgcctcccacatctgtgaaacagggagcatgaggcacaagtgagctggcaagtggtgctggtgacatcccagctcctgtcctgtgccttcacctctttttttttttttttttttttttgagatggagtctttctctgtcacccaggctggaatgcagtggcgtgatctcggctcactgcaacctccgcctttccaccttccgggttcaagcaactctcctgcctcagcctcccaagtagctgggactataggcgcccgccaccacacccagctaaatttttgtatttttagtagagacagggtttcaccatgtcagccaggatggtcttgatctcctgactttgtgatccgcccgcgtcggcctctcaaagtgctgggattacaggcgtgagccaccgcgcccggctgccttcacctcttaaggagctctgagactccacttctgagagtccctgcggcctcccacctccctgcctttcaaagctctctcccccatgacccaggataaccctatgtctcctcccccagaatccttcagtggctctcatcaccttcaggaaaagcccaaactccttccaccctccaggttcctccctccccacgaggctttgttctcctggggttgcttcctggaccctgaacaagttgtgctctcattggccgggcctggccagcagtgcacagtgcctggcaggttgactctaccatccccggggctggccccgctctcctccgagacccaggctgagcccagtcccctcacccttccttgacttacctccccacctgaggctgactttggggttcccagacaccctacccacacacatgccttgatcatagcacttgcctgcgcttcttcagagtcattaatttgcttctcggcttccccactggactgtgagctgcctgaggtcagggattgcgctttggatggtttccagcctgagcctggtgcttgaacagacgtgtgcaataaatgctcgttaaatgatg

SEQ ID NO: 171 - RNA, 2261 nt, Homo sapiens
  source 1..2261: mol_type = other RNA
gactgagcagaatggtgccattgcagatcaacacgcactttaaataatcaaaacccctatctttcccctgggaaggaggaagccgaggaaggctgtgtttctgactcacacgggggagtcgggggagtcgtaaacaaccctgaagagaacagccaggcctgttcccgcaagcccagacaatgccggtggaggaatttgtggctggctggatctctggcgctctgggcttggtcctgggacacccgtttgacactgtaaaggtgaggctgcagacccagaccacctaccggggcatcgttgattgcatggtcaagatttaccgccatgagtccctcctgggcttcttcaagggaatgagcttccccattgccagcatagctgtggtcaactctgtcctgtttggggtctatagcaacaccctgctggtgctcacggccacctcccaccaggagcggcgggcccagccgcccagctacatgcacatcttcctagcgggctgcaccggggggttcctgcaggcctactgtctggctccttttgacctcatcaaagtccggctacaaaaccagacagagccaagggcccagccagggagccccccaccccggtaccaggggcccgtgcactgtgcagcctccatcttccgggaggaggggccccgggggctgttccgaggagcctgggccctgacgctgagggacacccccacggtggggatctacttcatcacctatgaagggctctgtcgccagtacacaccagaaggccagaatcccagctcagccacggtgctggtggcagggggctttgcaggcattgcttcctgggtggcagccacgcccttagacatgatcaagtcccggatgcagatggatggactgagacgcagagtgtaccaggggatgctggactgcatggtgagcagcatccggcaggaaggactgggagtcttcttccggggggtcaccatcaacagtgcccgcgcctttcccgtcaatgctgtcaccttcctcagctacgaatatctcctccgctggtggggatgagccctgcggcaatgccagcagctccccatcaggcccacggcctggaggccagtttgagattggaggccaggttgaaagcttgcaaatcagtgcaagaggctcagcccttcctaaccaaggtgcctcccacccgcgcagatctgggctgggcagacacctgtgggagccggaagccagggggcctgtgcagcctccctgtgtagctggccttgactcctttgcctcccacatctgtgaaacagggagcatgaggcacaagtgagctggcaagtggtgctggtgacatcccagctcctgtcctgtgccttcacctctttttttttttttttttttttttgagatggagtctttctctgtcacccaggctggaatgcagtggcgtgatctcggctcactgcaacctccgcctttccaccttccgggttcaagcaactctcctgcctcagcctcccaagtagctgggactataggcgcccgccaccacacccagctaaatttttgtatttttagtagagacagggtttcaccatgtcagccaggatggtcttgatctcctgactttgtgatccgcccgcgtcggcctctcaaagtgctgggattacaggcgtgagccaccgcgcccggctgccttcacctcttaaggagctctgagactccacttctgagagtccctgcggcctcccacctccctgcctttcaaagctctctcccccatgacccaggataaccctatgtctcctcccccagaatccttcagtggctctcatcaccttcaggaaaagcccaaactccttccaccctccaggttcctccctccccacgaggctttgttctcctggggttgcttcctggaccctgaacaagttgtgctctcattggccgggcctggccagcagtgcacagtgcctggcaggttgactctaccatccccggggctggccccgctctcctccgagacccaggctgagcccagtcccctcacccttccttgacttacctccccacctgaggctgactttggggttcccagacaccctacccacacacatgccttgatcatagcacttgcctgcgcttcttcagagtcattaatttgcttctcggcttccccactggactgtgagctgcctgaggtcagggattgcgctttggatggtttccagcctgagcctggtgcttgaacagacgtgtgcaataaatgctcgttaaatgatg

SEQ ID NO: 172 - RNA, 2206 nt, Homo sapiens
  source 1..2206: mol_type = other RNA
gactgagcagaatggtgccattgcagatcaacacgcactttaaataatcaaaacccctatctttcccctgggaaggaggaagccgaggaaggctgtgtttctgactcacacgggggagtcgggggagtcgtaaacaaccctgaagagaacagccaggcctggcgctctgggcttggtcctgggacacccgtttgacactgtaaaggtgaggctgcagacccagaccacctaccggggcatcgttgattgcatggtcaagatttaccgccatgagtccctcctgggcttcttcaagggaatgagcttccccattgccagcatagctgtggtcaactctgtcctgtttggggtctatagcaacaccctgctggtgctcacggccacctcccaccaggagcggcgggcccagccgcccagctacatgcacatcttcctagcgggctgcaccggggggttcctgcaggcctactgtctggctccttttgacctcatcaaagtccggctacaaaaccagacagagccaagggcccagccagggagccccccaccccggtaccaggggcccgtgcactgtgcagcctccatcttccgggaggaggggccccgggggctgttccgaggagcctgggccctgacgctgagggacacccccacggtggggatctacttcatcacctatgaagggctctgtcgccagtacacaccagaaggccagaatcccagctcagccacggtgctggtggcagggggctttgcaggcattgcttcctgggtggcagccacgcccttagacatgatcaagtcccggatgcagatggatggactgagacgcagagtgtaccaggggatgctggactgcatggtgagcagcatccggcaggaaggactgggagtcttcttccggggggtcaccatcaacagtgcccgcgcctttcccgtcaatgctgtcaccttcctcagctacgaatatctcctccgctggtggggatgagccctgcggcaatgccagcagctccccatcaggcccacggcctggaggccagtttgagattggaggccaggttgaaagcttgcaaatcagtgcaagaggctcagcccttcctaaccaaggtgcctcccacccgcgcagatctgggctgggcagacacctgtgggagccggaagccagggggcctgtgcagcctccctgtgtagctggccttgactcctttgcctcccacatctgtgaaacagggagcatgaggcacaagtgagctggcaagtggtgctggtgacatcccagctcctgtcctgtgccttcacctctttttttttttttttttttttttgagatggagtctttctctgtcacccaggctggaatgcagtggcgtgatctcggctcactgcaacctccgcctttccaccttccgggttcaagcaactctcctgcctcagcctcccaagtagctgggactataggcgcccgccaccacacccagctaaatttttgtatttttagtagagacagggtttcaccatgtcagccaggatggtcttgatctcctgactttgtgatccgcccgcgtcggcctctcaaagtgctgggattacaggcgtgagccaccgcgcccggctgccttcacctcttaaggagctctgagactccacttctgagagtccctgcggcctcccacctccctgcctttcaaagctctctcccccatgacccaggataaccctatgtctcctcccccagaatccttcagtggctctcatcaccttcaggaaaagcccaaactccttccaccctccaggttcctccctccccacgaggctttgttctcctggggttgcttcctggaccctgaacaagttgtgctctcattggccgggcctggccagcagtgcacagtgcctggcaggttgactctaccatccccggggctggccccgctctcctccgagacccaggctgagcccagtcccctcacccttccttgacttacctccccacctgaggctgactttggggttcccagacaccctacccacacacatgccttgatcatagcacttgcctgcgcttcttcagagtcattaatttgcttctcggcttccccactggactgtgagctgcctgaggtcagggattgcgctttggatggtttccagcctgagcctggtgcttgaacagacgtgtgcaataaatgctcgttaaatgatg

SEQ ID NO: 173 - RNA, 2020 nt, Homo sapiens
  source 1..2020: mol_type = other RNA
gactgagcagaatggtgccattgcagatcaacacgcactttaaataatcaaaacccctatctttcccctgggaaggaggaagccgaggaaggctgtgtttctgactcacacgggggagtcgggggagtcgtaaacaaccctgaagagaacagccaggcctggcgctctgggcttggtcctgggacacccgtttgacactgtaaaggtgaggctgcagacccagaccacctaccggggcatcgttgattgcatggtcaagatttaccgccatgagtccgcctactgtctggctccttttgacctcatcaaagtccggctacaaaaccagacagagccaagggcccagccagggagccccccaccccggtaccaggggcccgtgcactgtgcagcctccatcttccgggaggaggggccccgggggctgttccgaggagcctgggccctgacgctgagggacacccccacggtggggatctacttcatcacctatgaagggctctgtcgccagtacacaccagaaggccagaatcccagctcagccacggtgctggtggcagggggctttgcaggcattgcttcctgggtggcagccacgcccttagacatgatcaagtcccggatgcagatggatggactgagacgcagagtgtaccaggggatgctggactgcatggtgagcagcatccggcaggaaggactgggagtcttcttccggggggtcaccatcaacagtgcccgcgcctttcccgtcaatgctgtcaccttcctcagctacgaatatctcctccgctggtggggatgagccctgcggcaatgccagcagctccccatcaggcccacggcctggaggccagtttgagattggaggccaggttgaaagcttgcaaatcagtgcaagaggctcagcccttcctaaccaaggtgcctcccacccgcgcagatctgggctgggcagacacctgtgggagccggaagccagggggcctgtgcagcctccctgtgtagctggccttgactcctttgcctcccacatctgtgaaacagggagcatgaggcacaagtgagctggcaagtggtgctggtgacatcccagctcctgtcctgtgccttcacctctttttttttttttttttttttttgagatggagtctttctctgtcacccaggctggaatgcagtggcgtgatctcggctcactgcaacctccgcctttccaccttccgggttcaagcaactctcctgcctcagcctcccaagtagctgggactataggcgcccgccaccacacccagctaaatttttgtatttttagtagagacagggtttcaccatgtcagccaggatggtcttgatctcctgactttgtgatccgcccgcgtcggcctctcaaagtgctgggattacaggcgtgagccaccgcgcccggctgccttcacctcttaaggagctctgagactccacttctgagagtccctgcggcctcccacctccctgcctttcaaagctctctcccccatgacccaggataaccctatgtctcctcccccagaatccttcagtggctctcatcaccttcaggaaaagcccaaactccttccaccctccaggttcctccctccccacgaggctttgttctcctggggttgcttcctggaccctgaacaagttgtgctctcattggccgggcctggccagcagtgcacagtgcctggcaggttgactctaccatccccggggctggccccgctctcctccgagacccaggctgagcccagtcccctcacccttccttgacttacctccccacctgaggctgactttggggttcccagacaccctacccacacacatgccttgatcatagcacttgcctgcgcttcttcagagtcattaatttgcttctcggcttccccactggactgtgagctgcctgaggtcagggattgcgctttggatggtttccagcctgagcctggtgcttgaacagacgtgtgcaataaatgctcgttaaatgatg

SEQ ID NO: 174 - RNA, 3091 nt, Homo sapiens
  source 1..3091: mol_type = other RNA
actgcaacagctgcctctcgggttcaagcgattctcctgcctcagcatcccaagtagctgggactacaggcgcccgtcatcacacccggctaatttttgtatttttggtagagatggggtttcactatgttggtcaggctggtctcgaactcctgacctcaggtggtccttccgcctcggcctcccaaagtgctgggattacaggcgtgagccactgcgcctggcctgtatcagttatagtttttgcaaaggcagtttcaggaataagaagcagaaccaggactgcagcccaagccaccacgagaggccagtctttggggatggtcttttaggatgatctttgggggtggcccaaggagccccaggcagctccagaggcaggagtcactcaggatttattgagagcccaccctgtgccacccgctgtgcacagaacacccagagatccctgtccagacagacaagttcttcccatcgtatgttggcgtgataactgtgatggagaaagagaggaagagccagcagtgcctccggctggggaggcggggcagacctcacccaggtggtgacatttgagccccagctggaggggtgccagggcaagagtgcccaggaagagggaagagccagtccacaggcctggagacagaaggctgactgaagaagagtctggaggctcgggtggctgcagcagagaaagcaagggggaggaagccgaggaaggctgtgtttctgactcacacgggggagtcgggggagtcgtaaacaaccctgaagagaacagccaggcctgttcccgcaagcccagacaatgccggtggaggaatttgtggctggctggatctctggtgagacatttttcttccttctgtcacatcacacccaatgggccctgcagttctgcgtggccagctggcagcagggcctgctctggatcccggcgacgacattatgagttgaagaaagaagagtaaagctctcggagagacttgcttcctgggcctggcacgagggccctcactcatagcaccctcttgtcaccacaggcgctctgggcttggtcctgggacacccgtttgacactgtaaaggtgaggctgcagacccagaccacctaccggggcatcgttgattgcatggtcaagatttaccgccatgagtccctcctgggcttcttcaagggaatgagcttccccattgccagcatagctgtggtcaactctgtcctgtttggggtctatagcaacaccctgctggtgctcacggccacctcccaccaggagcggcgggcccagccgcccagctacatgcacatcttcctagcgggctgcaccggggggttcctgcaggcctactgtctggctccttttgacctcatcaaagtccggctacaaaaccagacagagccaagggcccagccagggagccccccaccccggtaccaggggcccgtgcactgtgcagcctccatcttccgggaggaggggccccgggggctgttccgaggagcctgggccctgacgctgagggacacccccacggtggggatctacttcatcacctatgaagggctctgtcgccagtacacaccagaaggccagaatcccagctcagccacggtgctggtggcagggggctttgcaggcattgcttcctgggtggcagccacgcccttagacatgatcaagtcccggatgcagatggatggactgagacgcagagtgtaccaggggatgctggactgcatggtgagcagcatccggcaggaaggactgggagtcttcttccggggggtcaccatcaacagtgcccgcgcctttcccgtcaatgctgtcaccttcctcagctacgaatatctcctccgctggtggggatgagccctgcggcaatgccagcagctccccatcaggcccacggcctggaggccagtttgagattggaggccaggttgaaagcttgcaaatcagtgcaagaggctcagcccttcctaaccaaggtgcctcccacccgcgcagatctgggctgggcagacacctgtgggagccggaagccagggggcctgtgcagcctccctgtgtagctggccttgactcctttgcctcccacatctgtgaaacagggagcatgaggcacaagtgagctggcaagtggtgctggtgacatcccagctcctgtcctgtgccttcacctctttttttttttttttttttttttgagatggagtctttctctgtcacccaggctggaatgcagtggcgtgatctcggctcactgcaacctccgcctttccaccttccgggttcaagcaactctcctgcctcagcctcccaagtagctgggactataggcgcccgccaccacacccagctaaatttttgtatttttagtagagacagggtttcaccatgtcagccaggatggtcttgatctcctgactttgtgatccgcccgcgtcggcctctcaaagtgctgggattacaggcgtgagccaccgcgcccggctgccttcacctcttaaggagctctgagactccacttctgagagtccctgcggcctcccacctccctgcctttcaaagctctctcccccatgacccaggataaccctatgtctcctcccccagaatccttcagtggctctcatcaccttcaggaaaagcccaaactccttccaccctccaggttcctccctccccacgaggctttgttctcctggggttgcttcctggaccctgaacaagttgtgctctcattggccgggcctggccagcagtgcacagtgcctggcaggttgactctaccatccccggggctggccccgctctcctccgagacccaggctgagcccagtcccctcacccttccttgacttacctccccacctgaggctgactttggggttcccagacaccctacccacacacatgccttgatcatagcacttgcctgcgcttcttcagagtcattaatttgcttctcggcttccccactggactgtgagctgcctgaggtcagggattgcgctttggatggtttccagcctgagcctggtgcttgaacagacgtgtgcaataaatgctcgttaaatgatg

SEQ ID NO: 175 - RNA, 5349 nt, Homo sapiens
  source 1..5349: mol_type = other RNA
cttccctgtggcaggacttgggagcagtttccagccagaggctgccttgccaggggtggagaggacaaaggggaggccccacggtgcctactccgctgccactgtgtctctctgcagctcctgggcttcttcaagggaatgagcttccccattgccagcatagctgtggtcaactctgtcctgtttggggtctatagcaacaccctgctggtgctcacggccacctcccaccaggagcggcgggcccagccgcccagctacatgcacatcttcctagcgggctgcaccggggggttcctgcaggtgagggggcagtgagtgggcacacacaggtgtcatagggatggtcatctcgatctgtcctctcccaccctgccctggcgacccacagctgtggaggcataggcctcttggacgggaacaagaggcctgtgctatggccttccaggctgcaggcctctgggggagggctgtggggaacagagggggcaaaaggcagagacagctggtgggcagtgccaagagggtgctgggagaagcagcctgggccactcgctccagctgacggggcttgcccccctccagaggggtctgccaccctcagagctgtgggggagcccactccccaaggagacctttgaccctggagaaccaccagcaccccgcagagctgtgagcccagcccctctggccgggtcctgatgaggtcctgacactcccctggccctgcctggctctacactttgcctgcagtgcttgggtgcccatgacctgggagcctcacctgaggcccagcccagcagggcattaaccattcaggcactgccgtcatctgggctttgggctttagaggggtggatggagggaagagggaccagctgccgccagtgggaaccggtgctgaatgggtcctgtgagcataagcagggagagggtgcgcccggcacccactgacaccccagccgcaagccagggtcgccctctcctgggcagctgcccccagttccttgtcacacttcatggggcagagagcaaggacaaaggacaaagtcaggctgctccttcaaatgaattaatgattaatgagacccccggaggccccggcttttcttctgccccttcttgtgcgaggtgccacctataggtttcctgagccccgcgagccacatcccacaaacacaaggaagagaaccgaagccctaagctaagtggccaggcccggcttctaagtcaccctgcccccccagctctttggaaagcagaagtggggactgtgagggccgctgatggagcctgggtttacagtgaaacctgtggctttagtttaacagagtcttaaaggaaaaatgtgttttagtgtggagtgggaagaagaggcagggactgacagcctctgacgggcacagacgttgccctggtcttcgccgaagctgaccttctgaaatggcatctgacactccaccacccctgtgggggtgtctgtcacctggtgtcagcctagccctgtcctcagcccccaggagctcagggctcagaacacctcctgaagccctgagctcagccctgccagcacgctctagagggtggcacaaggccccatctcccaagggatggtacctaacctacgacccttactcctgggaccaaagtaaacaagcgaagacttggcctgccacaccctaagtaccaccacccaccaccagaggcgaccgccagcccccgtcgccatcagccatctccagggctgaggaactgagcccatgtacctgtcacaaaacaaacaagcaaaaaacagataaatccctcagagacaggctagccttgacatggaccccgattctcacctggactccaaaagctatcttgacctactggcatctctgacccaaatcttaattgcccccatcgccctctacatccccccagcactgaccctcaccaggactccagccccaattccatcccaaatctgtgtagcatctgcttctgccgattctaagagccctagcacctgccaagtccccccattacccaccttcccacactcagaagcctctttggtgggatgctaatgggaaggagtcttgcctctctggaggcaggaggggctggccttgtgcccctccgggcctctgagaggtgggcgcaggagaacagcactcacgaggggacctccttcaccctgggaaagggtggtttctttgctatttcacagtcacaggctgaatccttcacttggccctgcccaccgtacaggtatgctcactgccggctttagggaggccagaaaccaacctgctcctgcaaaaagaatccaggcttgttctgagtgcctgctgtaggccaggcaagttggtcactgttgcatgaggggcagtgcctctcactcttgggcctgatgccaagggaggtggcctgtcccggtcgcatgcagacatcctggccatcccagccacacatgcacgtgagaggctgggtgccggcagggttcctgagggactggaagatgtggccccctgcctgcctccttcctcttgtgaatataaggggccagttcccagcccaaagccccacccggggccctcatgtttcatcaccaacaggcctactgtctggctccttttgacctcatcaaagtccggctacaaaaccagacagagccaagggcccagccagggagccccccaccccggtaccaggggcccgtgcactgtgcagcctccatcttccgggaggaggggccccgggggctgttccgaggagcctgggccctgacgctgagggacacccccacggtggggatctacttcatcacctatgaagggctctgtcgccagtacacaccagaaggccagaatcccagctcagccacggtgctggtggcagggggctttgcaggcattgcttcctgggtggcagccacgcccttagacgtgatcaagtcccggatgcagatggatggactgagacgcagagtgtaccaggggatgctggactgcatggtgagcagcatccggcaggaaggactgggagtcttcttccggggggtcaccatcaacagtgcccgcgcctttcccgtcaatgctgtcaccttcctcagctacgaatatctcctccgctggtggggatgagccctgcggcaatgccagcagctccccatcaggcccacggcctggaggccagtttgagattggaggccaggttgaaagcttgcaaatcagtgcaagaggctcagcccttcctaaccaaggtgcctcccacccgcgcagatctgggctgggcagacacctgtgggagccggaagccagggggcctgtgcagcctccctgtgtagctggccttgactcctttgcctcccacatctgtgaaacagggagcatgaggcacaagtgagctggcaagtggtgctggtgacatcccagctcctgtcctgtgccttcacctcttttttttttttttttttttttgggatggagtctttctctgtcacccaggctggagtgcagtggcgtgatctcggctcactgcaacctccgcctttccaccttccgggttcaagcaactctcctgcctcagcctcccaagtagctgggactataggcgcccgccaccacacccggctaaatttttgtatttttagtagagacggggtttcaccatgtcggccaggatggtcttgatctcctgactttgtgatccgcccgcgtcggcctcccaaagtgctgagattaacaggcgtgagccaccacccccagctttcctctgtgatcccttctgatcggaccatctctgagcccatccagcaccaccgcagcgccagggattccaggctggacattgcagcgatggtacagcaggtgtcagaacaccactgggcagcccgtggctggaaggaagcaaacaggacgcatgaggaggaggaggtgggctcctataaacagtgcaggaagtaggcaggaggacaggtcagtgtggtcctctgttgtttgctatttctcatcaaattaccagttagcgggaattcccatttgggtgcccctctgtctgagagagagctgttctccttttccctttgcctattaaacctctgctcctaaactcaaaacaacaacaacaaaacagcaagggagtaaaatgaaaaaaatctattttttttggctttagttaaatgggctcccattctccctctctggttctatctagaggagtctcctaaagagcctggagtgcccgtcctctaaactccacctttacagccagagagagtggccagactcaggtgggaccagggagttccaggcccaagttccttccaccaatccatggcaaaggctacccactgggctgggagaacagtcctggagtgagtttagggtttagtatggtgtgattagtgagcaaataactcactcctgcacagtggccccaggaggagatgccactattggaggggagggcagaaagacaaagatggggcaggaaggggccggagagattctaaaaatctagatgttggctaggcatggtggctctcatctgtaatcctagcactttgggatgccaaggtgggcggatcacctggagtcaggagttcgagaccagcctggccgatatggtgaaaccccgtctctactaaaaacacaaagattagccgggcgtggtggcacatgcctgtagtcccagctactggggaggctgaggcaggagaatctcttgaacccaggtggtggaggttgaagtgagctgagattgccccactgcactccagactgggtgacagagagagactctatctcaaaaaacacaaaatttagccgggcttcgtggctcatgcctgtgatctcagcactttgggaggccaaggtgggcagatcacgaggtcaggagatcgagaccatcctggctaacacggtgaaacgccgtctctactaaaaatacaaagagttggccgggcatggtggcacgcacctgtggtcacagttacttgggaggctgaggcaggagaatcacccgaaccagagaggcggaggttgcggtgagccgaaatcgcgccattgcactccaggctggatgacagagcgagacttcgtctcaaaaaaaagaaaacaaaactagatgtttttaatcagcagggtctcataaggcatgcgaaattgcttaaggatttaacagatggtatctcaggttgctgttatttttgagaactcttttcgacagaagaaatccctaagaaccaggagatagtctgtgaacctgctttgaggttacaaaggaggtggtgtctgtcagtcacttgcaaagagctgataacttgagcaaacatgttaaataaagtcccattggactcct

SEQ ID NO: 176 - RNA, 2275 nt, Homo sapiens
  source 1..2275: mol_type = other RNA
gaatggtgccattgcagatcaacacgcactttaaataatcaaaacccctatctttcccctgggaaggaggaagccgaggaaggctgtgtttctgactcacacgggggagtcgggggagtcgtaaacaaccctgaagagaacagccaggcctggcgctctgggcttggtcctgggacacccgtttgacactgtaaaggtgaggctgcagacccagaccacctaccggggcatcgttgattgcatggtcaagatttaccgccatgagtccctcctgggcttcttcaagggaatgagcttccccattgccagcatagctgtggtcaactctgtcctgtttggggtctatagcaacaccctgctggtgctcacggccacctcccaccaggagcggcgggcccagccgcccagctacatgcacatcttcctagcgggctgcaccggggggttcctgcaggcctactgtctggctccttttgacctcatcaaagtccggctacaaaaccagacagagccaagggcccagccagggagccccccaccccggtaccaggggcccgtgcactgtgcagcctccatcttccgggaggaggggccccgggggctgttccgaggagcctgggccctgacgctgagggacacccccacggtggggatctacttcatcacctatgaagggctctgtcgccagtacacaccagaaggccagaatcccagctcagccacggtgctggtggcagggggctttgcaggcattgcttcctgggtggcagccacgcccttagacgtgatcaagtcccggatgcagatggatggactgagacgcagagtgtaccaggggatgctggactgcatggtgagcagcatccggcaggaaggactgggagtcttcttccggggggtcaccatcaacagtgcccgcgcctttcccgtcaatgctgtcaccttcctcagctacgaatatctcctccgctggtggggatgagccctgcggcaatgccagcagctccccatcaggcccacggcctggaggccagtttgagattggaggccaggttgaaagcttgcaaatcagtgcaagaggctcagcccttcctaaccaaggtgcctcccacccgcgcagatctgggctgggcagacacctgtgggagccggaagccagggggcctgtgcagcctccctgtgtagctggccttgactcctttgcctcccacatctgtgaaacagggagcatgaggcacaagtgagctggcaagtggtgctggtgacatcccagctcctgtcctgtgccttcacctctttttttttttttttttttttttttttgagatggagtctttctctgtcacccaggctggaatgcagtggcgtgatctcggctcactgcaacctccgcctttccaccttccgggttcaagcaactctcctgcctcagcctcccaagtagctgggactataggcgcccgccaccacacccagctaaatttttgtatttttagtagagacagggtttcaccatgtcagccaggatggtcttgatctcctgactttgtgatccgcccgcgtcggcctctcaaagtgctgggattacaggcgtgagccaccgcgcccggctgccttcacctcttaaggagctctgagactccacttctgagagtccctgcggcctcccacctccctgcctttcaaagctctctcccccatgacccaggataaccctatgtctcctcccccagaatccttcagtggctctcatcaccttcaggaaaagcccaaactccttccaccctccaggttcctccctccccacgaggctttgttctcctggggttgcttcctggaccctgaacaagttgtgctctcattggccgggcctggccagcagtgcacagtgcctggcaggttgactctaccatccccggggctggccccgctctcctccgagacccaggctgagcccagtcccctcacccttccttgacttacctccccacctgaggctgactttggggttcccagacaccctacccacacacatgccttgatcatagcacttgcctgcgcttcttcagagtcattaatttgcttctcggcttccccactggactgtgagctgcctgaggtcagggattgcgctttggatggtttccagcctgagcctggtgcttgaacagacgtgtgcaataaatgctcgttaaatgaaaaaaaaaaaaaaaaaaaaaaaaaaaaaaaaaaaaaaaaaaaaaaaaaaaaaaaaaaaaaaaaaaaaaaaaaaaaa

SEQ ID NO: 177 - RNA, 3088 nt, Homo sapiens
  source 1..3088: mol_type = other RNA
actgcaacagctgcctctcgggttcaagcgattctcctgcctcagcatcccaagtagctgggactacaggcgcccgtcatcacacccggctaatttttgtatttttggtagagatggggtttcactatgttggtcaggctggtctcgaactcctgacctcaggtggtccttccgcctcggcctcccaaagtgctgggattacaggcgtgagccactgcgcctggcctgtatcagttatagtttttgcaaaggcagtttcaggaataagaagcagaaccaggactgcagcccaagccaccacgagaggccagtctttggggatggtcttttaggatgatctttgggggtggcccaaggagccccaggcagctccagaggcaggagtcactcaggatttattgagagcccaccctgtgccacccgctgtgcacagaacacccagagatccctgtccagacagacaagttcttcccatcgtatgttggcgtgataactgtgatggagaaagagaggaagagccagcagtgcctccggctggggaggcggggcagacctcacccaggtggtgacatttgagccccagctggaggggtgccagggcaagagtgcccaggaagagggaagagccagtccacaggcctggagacagaaggctgactgaagaagagtctggaggctcgggtggctgcagcagagaaagcaagggggaggaagccgaggaaggctgtgtttctgactcacacgggggagtcgggggagtcgtaaacaaccctgaagagaacagccaggcctgttcccgcaagcccagacaatgccggtggaggaatttgtggctggctggatctctggtgagacatttttcttccttctgtcacatcacacccaatgggccctgcagttctgcgtggccagctggcagcagggcctgctctggatcccggcgacgacattatgagttgaagaaagaagagtaaagctctcggagagacttgcttcctgggcctggcacgagggccctcactcatagcaccctcttgtcaccacaggcgctctgggcttggtcctgggacacccgtttgacactgtaaaggtgaggctgcagacccagaccacctaccggggcatcgttgattgcatggtcaagatttaccgccatgagtccctcctgggcttcttcaagggaatgagcttccccattgccagcatagctgtggtcaactctgtcctgtttggggtctatagcaacaccctgctggtgctcacggccacctcccaccaggagcggcgggcccagccgcccagctacatgcacatcttcctagcgggctgcaccggggggttcctgcaggcctactgtctggctccttttgacctcatcaaagtccggctacaaaaccagacagagccaagggcccagccagggagccccccaccccggtaccaggggcccgtgcactgtgcagcctccatcttccgggaggaggggccccgggggctgttccgaggagcctgggccctgacgctgagggacacccccacggtggggatctacttcatcacctatgaagggctctgtcgccagtacacaccagaaggccagaatcccagctcagccacggtgctggtggcagggggctttgcaggcattgcttcctgggtggcagccacgcccttagacgtgatcaagtcccggatgcagatggatggactgagacgcagagtgtaccaggggatgctggactgcatggtgagcagcatccggcaggaaggactgggagtcttcttccggggggtcaccatcaacagtgcccgcgcctttcccgtcaatgctgtcaccttcctcagctacgaatatctcctccgctggtggggatgagccctgcggcaatgccagcagctccccatcaggcccacggcctggaggccagtttgagattggaggccaggttgaaagcttgcaaatcagtgcaagaggctcagcccttcctaaccaaggtgcctcccacccgcgcagatctgggctgggcagacacctgtgggagccggaagccagggggcctgtgcagcctccctgtgtagctggccttgactcctttgcctcccacatctgtgaaacagggagcatgaggcacaagtgagctggcaagtggtgctggtgacatcccagctcctgtcctgtgccttcacctctttttttttttttttttttttttgagatggagtctttctctgtcacccaggctggagtgcagtggcgtgatctcggctcactgcaacctccgcctttccaccttccgggttcaggcaactctcctgcctcagcctcccaagtggctgggactgtaggcgcccgccaccacacccagctggatttttgtatttttggtagagacagggtttcgccatgtcggccaggatggtcttgatctcctgactttgtgatccgcccgcgtcggcctctcaaagtgctgggattacaggcgtgagccaccgcgcccggctgccttcacctcttaaggagctctgagactccacttctgagagtccctgcggcctcccacctccctgcctttcaaagctctctcccccatgacccaggataaccctatgtctcctcccccagaatccttcagtggctctcatcaccttcaggaaaagcccaaactccttccaccctccaggttcctccctccccacgaggctttgttctcctggggttgcttcctggaccctgaacaagttgtgctctcattggccgggcctggccagcagtgcacagtgcctggcaggttgactctaccatccccggggctggccccgctctcctccgagacccaggctgagcccagtcccctcacccttccttgacttacctccccacctgaggctgactttggggttcccagacaccctacccacacacatgccttgatcatagcacttgcctgcgcttcttcagagtcattaatttgcttctcggcttccccactggactgtgagctgcctgaggtcagggattgcgctttggatggtttccagcctgagcctggtgcttgaacagacgtgtgcaataaatgctcgttaaatg

SEQ ID NO: 178 - RNA, 561 nt, Homo sapiens
  source 1..561: mol_type = other RNA
cacagatccttgaaagggttttggttttgactgagcagaatggtgccattgcagatcaacacgcactttaaataatcaaaacccctatctttcccctgggaaggaggaagccgaggaaggctgtgtttctgactcacacgggggagtcgggggagtcgtaaacaaccctgaagagaacagccaggcctgttcccgcaagcccagacaatgccggtggaggaatttgtggctggctggatctctggcgctctgggcttggtcctgggacacccgtttgacactgtaaaggtgaggctgcagacccagaccacctaccggggcatcgttgattgcatggtcaagatttaccgccatgagtccctcctgggcttcttcaagggaatgagcttccccattgccagcatagctgtggtcaactctgtcctgtttggggtctatagcaacaccctgctggtgctcacggccacctcccaccaggagcggcgggcccagccgcccagctacatgcacatcttcctagcgggctgcaccggggggttcctgcaggcctactgtctggct

SEQ ID NO: 179 - DNA, 2209 bp, Homo sapiens
  source 1..2209: mol_type = genomic DNA
acccctatctttcccctgggaaggaggaagccgaggaaggctgtgtttctgactcacacgggggagtcgggggagtcgtaaacaaccctgaagagaacagccaggcctgttcccgcaagcccagacaatgccggtggaggaatttgtggctggctggatctctggcgctctgggcttggtcctgggacacccgtttgacactgtaaaggtgaggctgcagacccagaccacctaccggggcatcgttgattgcatggtcaagatttaccgccatgagtccctcctgggcttcttcaagggaatgagcttccccattgccagcatagctgtggtcaactctgtcctgtttggggtctatagcaacaccctgctggtgctcacggccacctcccaccaggagcggcgggcccagccgcccagctacatgcacatcttcctagcgggctgcaccggggggttcctgcaggcctactgtctggctccttttgacctcatcaaagtccggctacaaaaccagacagagccaagggcccagccagggagccccccaccccggtaccaggggcccgtgcactgtgcagcctccatcttccgggaggaggggccccgggggctgttccgaggagcctgggccctgacgctgagggacacccccacggtggggatctacttcatcacctatgaagggctctgtcgccagtacacaccagaaggccagaatcccagctcagccacggtgctggtggcagggggctttgcaggcattgcttcctgggtggcagccacgcccttagacatgatcaagtcccggatgcagatggatggactgagacgcagagtgtaccaggggatgctggactgcatggtgagcagcatccggcaggaaggactgggagtcttcttccggggggtcaccatcaacagtgcccgcgcctttcccgtcaatgctgtcaccttcctcagctacgaatatctcctccgctggtggggatgagccctgcggcaatgccagcagctccccatcaggcccacggcctggaggccagtttgagattggaggccaggttgaaagcttgcaaatcagtgcaagaggctcagcccttcctaaccaaggtgcctcccacccgcgcagatctgggctgggcagacacctgtgggagccggaagccagggggcctgtgcagcctccctgtgtagctggccttgactcctttgcctcccacatctgtgaaacagggagcatgaggcacaagtgagctggcaagtggtgctggtgacatcccagctcctgtcctgtgccttcacctctttttttttttttttttttttttgagatggagtctttctctgtcacccaggctggaatgcagtggcgtgatctcggctcactgcaacctccgcctttccaccttccgggttcaagcaactctcctgcctcagcctcccaagtagctgggactataggcgcccgccaccacacccagctaaatttttgtatttttagtagagacagggtttcaccatgtcagccaggatggtcttgatctcctgactttgtgatccgcccgcgtcggcctctcaaagtgctgggattacaggcgtgagccaccgcgcccggctgccttcacctcttaaggagctctgagactccacttctgagagtccctgcggcctcccacctccctgcctttcaaagctctctcccccatgacccaggataaccctatgtctcctcccccagaatccttcagtggctctcatcaccttcaggaaaagcccaaactccttccaccctccaggttcctccctccccacgaggctttgttctcctggggttgcttcctggaccctgaacaagttgtgctctcattggccgggcctggccagcagtgcacagtgcctggcaggttgactctaccatccccggggctggccccgctctcctccgagacccaggctgagcccagtcccctcacccttccttgacttacctccccacctgaggctgactttggggttcccagacaccctacccacacacatgccttgatcatagcacttgcctgcgcttcttcagagtcattaatttgcttctcggcttccccactggactgtgagctgcctgaggtcagggattgcgctttggatggtttccagcctgagcctggtgcttgaacagacgtgtgcaataaatgctcgttaaatgatg

SEQ ID NO: 180 - DNA, 894 bp, Homo sapiens
  source 1..894: mol_type = genomic DNA
atgccggtggaggaatttgtggctggctggatctctggcgctctgggcttggtcctgggacacccgtttgacactgtaaaggtgaggctgcagacccagaccacctaccggggcatcgttgattgcatggtcaagatttaccgccatgagtccgcctactgtctggctccttttgacctcatcaaagtccggctacaaaaccagacagagccaagggcccagccagggagccccccaccccggtaccaggggcccgtgcactgtgcagcctccatcttccgggaggaggggccccgggggctgttccgaggagcctgggccctgacgctgagggacacccccacggtggggatctacttcatcacctatgaagggctctgtcgccagtacacaccagaaggccagaatcccagctcagccacggtgctggtggcagggggctttgcaggcattgcttcctgggtggcagccacgcccttagacatgatcaagtcccggatgcagatggatggactgagacgcagagtgtaccaggggatgctggactgcatggtgagcagcatccggcaggaaggactgggagtcttcttccggggggtcaccatcaacagtgcccgcgcctttcccgtcaatgctgtcaccttcctcagctacgaatatctcctccgctggtggggatgagccctgcggcaatgccagcagctccccatcaggcccacggcctggaggccagtttgagattggaggccaggttgaaagcttgcaaatcagtgcaagaggctcagcccttcctaaccaaggtgcctcccacccgcgcagatctgggctgggcagacacctgtgggagccggaagccagggggcctgtgcagcctccctgtgtagctggccttga

SEQ ID NO: 181 - DNA, 2138 bp, Homo sapiens
  source 1..2138: mol_type = genomic DNA
ggggaattcaactctgtctcctctgctggagccaccagttcccgcaagcccagacaatgccggtggaggaatttgtggctggctggatctctggcgctctgggcttggtcctgggacacccgtttgacactgtaaaggtgaggctgcagacccagaccacctaccggggcatcgttgattgcatggtcaagatttaccgccatgagtccctcctgggcttcttcaagggaatgagcttccccattgccagcatagctgtggtcaactctgtcctgtttggggtctatagcaacaccctgctggtgctcacggccacctcccaccaggagcggcgggcccagccgcccagctacatgcacatcttcctagcgggctgcaccggggggttcctgcaggcctactgtctggctccttttgacctcatcaaagtccggctacaaaaccagacagagccaagggcccagccagggagccccccaccccggtaccaggggcccgtgcactgtgcagcctccatcttccgggaggaggggccccgggggctgttccgaggagcctgggccctgacgctgagggacacccccacggtggggatctacttcatcacctatgaagggctctgtcgccagtacacaccagaaggccagaatcccagctcagccacggtgctggtggcagggggctttgcaggcattgcttcctgggtggcagccacgcccttagacatgatcaagtcccggatgcagatggatggactgagacgcagagtgtaccaggggatgctggactgcatggtgagcagcatccggcaggaaggactgggagtcttcttccggggggtcaccatcaacagtgcccgcgcctttcccgtcaatgctgtcaccttcctcagctacgaatatctcctccgctggtggggatgagccctgcggcaatgccagcagctccccatcaggcccacggcctggaggccagtttgagattggaggccaggttgaaagcttgcaaatcagtgcaagaggctcagcccttcctaaccaaggtgcctcccacccgcgcagatctgggctgggcagacacctgtgggagccggaagccagggggcctgtgcagcctccctgtgtagctggccttgactcctttgcctcccacatctgtgaaacagggagcatgaggcacaagtgagctggcaagtggtgctggtgacatcccagctcctgtcctgtgccttcacctctttttttttttttttttttttttgagatggagtctttctctgtcacccaggctggaatgcagtggcgtgatctcggctcactgcaacctccgcctttccaccttccgggttcaagcaactctcctgcctcagcctcccaagtagctgggactataggcgcccgccaccacacccagctaaatttttgtatttttagtagagacagggtttcaccatgtcagccaggatggtcttgatctcctgactttgtgatccgcccgcgtcggcctctcaaagtgctgggattacaggcgtgagccaccgcgcccggctgccttcacctcttaaggagctctgagactccacttctgagagtccctgcggcctcccacctccctgcctttcaaagctctctcccccatgacccaggataaccctatgtctcctcccccagaatccttcagtggctctcatcaccttcaggaaaagcccaaactccttccaccctccaggttcctccctccccacgaggctttgttctcctggggttgcttcctggaccctgaacaagttgtgctctcattggccgggcctggccagcagtgcacagtgcctggcaggttgactctaccatccccggggctggccccgctctcctccgagacccaggctgagcccagtcccctcacccttccttgacttacctccccacctgaggctgactttggggttcccagacaccctacccacacacatgccttgatcatagcacttgcctgcgcttcttcagagtcattaatttgcttctcggcttccccactggactgtgagctgcctgaggtcagggattgcgctttggatggtttccagcctgagcctggtgcttgaacagacgtgtgcaataaatgctcgttaaatgatg

SEQ ID NO: 182 - DNA, 2432 bp, Homo sapiens
  source 1..2432: mol_type = genomic DNA
atgggggcggccatgccccttggtggagatgaatgggagtggagctgggctggctgggcaggcaggggcttgcctcttgctgactaaggcagccctggaggggcccgaccatggggcaggaacccagttgccatcctcagagcgaggatcattggccgggctcggggatcagggcctctgtggtcccggcacgcctggcccgtgagactgtactctgcacgactcctccaggtggccagggtcaccggaactggctcgctctcctctgccagttgccggaggtctgggcaccaggccaattctcaccttcccgccagggttaaacattagtgggaggttatcagcgtgggccaggggagggagaggggggaattcaactctgtctcctctgctggagccaccagttcccgcaagcccagacaatgccggtggaggaatttgtggctggctggatctctggcgctctgggcttggtcctgggacacccgtttgacactgtaaagctcctgggcttcttcaagggaatgagcttccccattgccagcatagctgtggtcaactctgtcctgtttggggtctatagcaacaccctgctggtgctcacggccacctcccaccaggagcggcgggcccagccgcccagctacatgcacatcttcctagcgggctgcaccggggggttcctgcaggcctactgtctggctccttttgacctcatcaaagtccggctacaaaaccagacagagccaagggcccagccagggagccccccaccccggtaccaggggcccgtgcactgtgcagcctccatcttccgggaggaggggccccgggggctgttccgaggagcctgggccctgacgctgagggacacccccacggtggggatctacttcatcacctatgaagggctctgtcgccagtacacaccagaaggccagaatcccagctcagccacggtgctggtggcagggggctttgcaggcattgcttcctgggtggcagccacgcccttagacatgatcaagtcccggatgcagatggatggactgagacgcagagtgtaccaggggatgctggactgcatggtgagcagcatccggcaggaaggactgggagtcttcttccggggggtcaccatcaacagtgcccgcgcctttcccgtcaatgctgtcaccttcctcagctacgaatatctcctccgctggtggggatgagccctgcggcaatgccagcagctccccatcaggcccacggcctggaggccagtttgagattggaggccaggttgaaagcttgcaaatcagtgcaagaggctcagcccttcctaaccaaggtgcctcccacccgcgcagatctgggctgggcagacacctgtgggagccggaagccagggggcctgtgcagcctccctgtgtagctggccttgactcctttgcctcccacatctgtgaaacagggagcatgaggcacaagtgagctggcaagtggtgctggtgacatcccagctcctgtcctgtgccttcacctctttttttttttttttttttttttgagatggagtctttctctgtcacccaggctggaatgcagtggcgtgatctcggctcactgcaacctccgcctttccaccttccgggttcaagcaactctcctgcctcagcctcccaagtagctgggactataggcgcccgccaccacacccagctaaatttttgtatttttagtagagacagggtttcaccatgtcagccaggatggtcttgatctcctgactttgtgatccgcccgcgtcggcctctcaaagtgctgggattacaggcgtgagccaccgcgcccggctgccttcacctcttaaggagctctgagactccacttctgagagtccctgcggcctcccacctccctgcctttcaaagctctctcccccatgacccaggataaccctatgtctcctcccccagaatccttcagtggctctcatcaccttcaggaaaagcccaaactccttccaccctccaggttcctccctccccacgaggctttgttctcctggggttgcttcctggaccctgaacaagttgtgctctcattggccgggcctggccagcagtgcacagtgcctggcaggttgactctaccatccccggggctggccccgctctcctccgagacccaggctgagcccagtcccctcacccttccttgacttacctccccacctgaggctgactttggggttcccagacaccctacccacacacatgccttgatcatagcacttgcctgcgcttcttcagagtcattaatttgcttctcggcttccccactggactgtgagctgcctgaggtcagggattgcgctttggatggtttccagcctgagcctggtgcttgaacagacgtgtgcaataaatgctcgttaaatgatg

SEQ ID NO: 183 - DNA, 2286 bp, Homo sapiens
  source 1..2286: mol_type = genomic DNA
agatccttgaaagggttttggttttgactgagcagaatggtgccattgcagatcaacacgcactttaaataatcaaaacccctatctttcccctgggaaggaggaagccgaggaaggctgtgtttctgactcacacgggggagtcgggggagtcgtaaacaaccctgaagagaacagccaggcctgttcccgcaagcccagacaatgccggtggaggaatttgtggctggctggatctctggcgctctgggcttggtcctgggacacccgtttgacactgtaaaggtgaggctgcagacccagaccacctaccggggcatcgttgattgcatggtcaagatttaccgccatgagtccctcctgggcttcttcaagggaatgagcttccccattgccagcatagctgtggtcaactctgtcctgtttggggtctatagcaacaccctgctggtgctcacggccacctcccaccaggagcggcgggcccagccgcccagctacatgcacatcttcctagcgggctgcaccggggggttcctgcaggcctactgtctggctccttttgacctcatcaaagtccggctacaaaaccagacagagccaagggcccagccagggagccccccaccccggtaccaggggcccgtgcactgtgcagcctccatcttccgggaggaggggccccgggggctgttccgaggagcctgggccctgacgctgagggacacccccacggtggggatctacttcatcacctatgaagggctctgtcgccagtacacaccagaaggccagaatcccagctcagccacggtgctggtggcagggggctttgcaggcattgcttcctgggtggcagccacgcccttagacatgatcaagtcccggatgcagatggatggactgagacgcagagtgtaccaggggatgctggactgcatggtgagcagcatccggcaggaaggactgggagtcttcttccggggggtcaccatcaacagtgcccgcgcctttcccgtcaatgctgtcaccttcctcagctacgaatatctcctccgctggtggggatgagccctgcggcaatgccagcagctccccatcaggcccacggcctggaggccagtttgagattggaggccaggttgaaagcttgcaaatcagtgcaagaggctcagcccttcctaaccaaggtgcctcccacccgcgcagatctgggctgggcagacacctgtgggagccggaagccagggggcctgtgcagcctccctgtgtagctggccttgactcctttgcctcccacatctgtgaaacagggagcatgaggcacaagtgagctggcaagtggtgctggtgacatcccagctcctgtcctgtgccttcacctctttttttttttttttttttttttgagatggagtctttctctgtcacccaggctggaatgcagtggcgtgatctcggctcactgcaacctccgcctttccaccttccgggttcaagcaactctcctgcctcagcctcccaagtagctgggactataggcgcccgccaccacacccagctaaatttttgtatttttagtagagacagggtttcaccatgtcagccaggatggtcttgatctcctgactttgtgatccgcccgcgtcggcctctcaaagtgctgggattacaggcgtgagccaccgcgcccggctgccttcacctcttaaggagctctgagactccacttctgagagtccctgcggcctcccacctccctgcctttcaaagctctctcccccatgacccaggataaccctatgtctcctcccccagaatccttcagtggctctcatcaccttcaggaaaagcccaaactccttccaccctccaggttcctccctccccacgaggctttgttctcctggggttgcttcctggaccctgaacaagttgtgctctcattggccgggcctggccagcagtgcacagtgcctggcaggttgactctaccatccccggggctggccccgctctcctccgagacccaggctgagcccagtcccctcacccttccttgacttacctccccacctgaggctgactttggggttcccagacaccctacccacacacatgccttgatcatagcacttgcctgcgcttcttcagagtcattaatttgcttctcggcttccccactggactgtgagctgcctgaggtcagggattgcgctttggatggtttccagcctgagcctggtgcttgaacagacgtgtgcaataaatgctcgttaaatgatg

SEQ ID NO: 184 - DNA, 2196 bp, Homo sapiens
  source 1..2196: mol_type = genomic DNA
agaatggtgccattgcagatcaacacgcactttaaataatcaaaacccctatctttcccctgggaaggaggaagccgaggaaggctgtgtttctgactcacacgggggagtcgggggagtcgtaaacaaccctgaagagaacagccaggcctggcgctctgggcttggtcctgggacacccgtttgacactgtaaaggtgaggctgcagacccagaccacctaccggggcatcgttgattgcatggtcaagatttaccgccatgagtccctcctgggcttcttcaagggaatgagcttccccattgccagcatagctgtggtcaactctgtcctgtttggggtctatagcaacaccctgctggtgctcacggccacctcccaccaggagcggcgggcccagccgcccagctacatgcacatcttcctagcgggctgcaccggggggttcctgcaggcctactgtctggctccttttgacctcatcaaagtccggctacaaaaccagacagagccaagggcccagccagggagccccccaccccggtaccaggggcccgtgcactgtgcagcctccatcttccgggaggaggggccccgggggctgttccgaggagcctgggccctgacgctgagggacacccccacggtggggatctacttcatcacctatgaagggctctgtcgccagtacacaccagaaggccagaatcccagctcagccacggtgctggtggcagggggctttgcaggcattgcttcctgggtggcagccacgcccttagacatgatcaagtcccggatgcagatggatggactgagacgcagagtgtaccaggggatgctggactgcatggtgagcagcatccggcaggaaggactgggagtcttcttccggggggtcaccatcaacagtgcccgcgcctttcccgtcaatgctgtcaccttcctcagctacgaatatctcctccgctggtggggatgagccctgcggcaatgccagcagctccccatcaggcccacggcctggaggccagtttgagattggaggccaggttgaaagcttgcaaatcagtgcaagaggctcagcccttcctaaccaaggtgcctcccacccgcgcagatctgggctgggcagacacctgtgggagccggaagccagggggcctgtgcagcctccctgtgtagctggccttgactcctttgcctcccacatctgtgaaacagggagcatgaggcacaagtgagctggcaagtggtgctggtgacatcccagctcctgtcctgtgccttcacctctttttttttttttttttttttttgagatggagtctttctctgtcacccaggctggaatgcagtggcgtgatctcggctcactgcaacctccgcctttccaccttccgggttcaagcaactctcctgcctcagcctcccaagtagctgggactataggcgcccgccaccacacccagctaaatttttgtatttttagtagagacagggtttcaccatgtcagccaggatggtcttgatctcctgactttgtgatccgcccgcgtcggcctctcaaagtgctgggattacaggcgtgagccaccgcgcccggctgccttcacctcttaaggagctctgagactccacttctgagagtccctgcggcctcccacctccctgcctttcaaagctctctcccccatgacccaggataaccctatgtctcctcccccagaatccttcagtggctctcatcaccttcaggaaaagcccaaactccttccaccctccaggttcctccctccccacgaggctttgttctcctggggttgcttcctggaccctgaacaagttgtgctctcattggccgggcctggccagcagtgcacagtgcctggcaggttgactctaccatccccggggctggccccgctctcctccgagacccaggctgagcccagtcccctcacccttccttgacttacctccccacctgaggctgactttggggttcccagacaccctacccacacacatgccttgatcatagcacttgcctgcgcttcttcagagtcattaatttgcttctcggcttccccactggactgtgagctgcctgaggtcagggattgcgctttggatggtttccagcctgagcctggtgcttgaacagacgtgtgcaataaatgctcgttaaatga

SEQ ID NO: 185 - DNA, 1975 bp, Homo sapiens
  source 1..1975: mol_type = genomic DNA
agttcccgcaagcccagacaatgccggtggaggaatttgtggctggctggatctctgacttgcttcctgggcctggcacgagggccctcactcatagcaccctcttgtcaccacaggcgctctgggcttggtcctgggacacccgtttgacactgtaaaggtgaggctgcagacccagaccacctaccggggcatcgttgattgcatggtcaagatttaccgccatgagtccgcctactgtctggctccttttgacctcatcaaagtccggctacaaaaccagacagagccaagggcccagccagggagccccccaccccggtaccaggggcccgtgcactgtgcagcctccatcttccgggaggaggggccccgggggctgttccgaggagcctgggccctgacgctgagggacacccccacggtggggatctacttcatcacctatgaagggctctgtcgccagtacacaccagaaggccagaatcccagctcagccacggtgctggtggcagggggctttgcaggcattgcttcctgggtggcagccacgcccttagacatgatcaagtcccggatgcagatggatggactgagacgcagagtgtaccaggggatgctggactgcatggtgagcagcatccggcaggaaggactgggagtcttcttccggggggtcaccatcaacagtgcccgcgcctttcccgtcaatgctgtcaccttcctcagctacgaatatctcctccgctggtggggatgagccctgcggcaatgccagcagctccccatcaggcccacggcctggaggccagtttgagattggaggccaggttgaaagcttgcaaatcagtgcaagaggctcagcccttcctaaccaaggtgcctcccacccgcgcagatctgggctgggcagacacctgtgggagccggaagccagggggcctgtgcagcctccctgtgtagctggccttgactcctttgcctcccacatctgtgaaacagggagcatgaggcacaagtgagctggcaagtggtgctggtgacatcccagctcctgtcctgtgccttcacctctttttttttttttttttttttttgagatggagtctttctctgtcacccaggctggaatgcagtggcgtgatctcggctcactgcaacctccgcctttccaccttccgggttcaagcaactctcctgcctcagcctcccaagtagctgggactataggcgcccgccaccacacccagctaaatttttgtatttttagtagagacagggtttcaccatgtcagccaggatggtcttgatctcctgactttgtgatccgcccgcgtcggcctctcaaagtgctgggattacaggcgtgagccaccgcgcccggctgccttcacctcttaaggagctctgagactccacttctgagagtccctgcggcctcccacctccctgcctttcaaagctctctcccccatgacccaggataaccctatgtctcctcccccagaatccttcagtggctctcatcaccttcaggaaaagcccaaactccttccaccctccaggttcctccctccccacgaggctttgttctcctggggttgcttcctggaccctgaacaagttgtgctctcattggccgggcctggccagcagtgcacagtgcctggcaggttgactctaccatccccggggctggccccgctctcctccgagacccaggctgagcccagtcccctcacccttccttgacttacctccccacctgaggctgactttggggttcccagacaccctacccacacacatgccttgatcatagcacttgcctgcgcttcttcagagtcattaatttgcttctcggcttccccactggactgtgagctgcctgaggtcagggattgcgctttggatggtttccagcctgagcctggtgcttgaacagacgtgtgcaataaatgctcgttaaatgatg

SEQ ID NO: 186 - DNA, 2102 bp, Homo sapiens
  source 1..2102: mol_type = genomic DNA
agttcccgcaagcccagacaatgccggtggaggaatttgtggctggctggatctctggcgctctgggcttggtcctgggacacccgtttgacactgtaaaggtgaggctgcagacccagaccacctaccggggcatcgttgattgcatggtcaagatttaccgccatgagtccctcctgggcttcttcaagggaatgagcttccccattgccagcatagctgtggtcaactctgtcctgtttggggtctatagcaacaccctgctggtgctcacggccacctcccaccaggagcggcgggcccagccgcccagctacatgcacatcttcctagcgggctgcaccggggggttcctgcaggcctactgtctggctccttttgacctcatcaaagtccggctacaaaaccagacagagccaagggcccagccagggagccccccaccccggtaccaggggcccgtgcactgtgcagcctccatcttccgggaggaggggccccgggggctgttccgaggagcctgggccctgacgctgagggacacccccacggtggggatctacttcatcacctatgaagggctctgtcgccagtacacaccagaaggccagaatcccagctcagccacggtgctggtggcagggggctttgcaggcattgcttcctgggtggcagccacgcccttagacatgatcaagtcccggatgcagatggatggactgagacgcagagtgtaccaggggatgctggactgcatggtgagcagcatccggcaggaaggactgggagtcttcttccggggggtcaccatcaacagtgcccgcgcctttcccgtcaatgctgtcaccttcctcagctacgaatatctcctccgctggtggggatgagccctgcggcaatgccagcagctccccatcaggcccacggcctggaggccagtttgagattggaggccaggttgaaagcttgcaaatcagtgcaagaggctcagcccttcctaaccaaggtgcctcccacccgcgcagatctgggctgggcagacacctgtgggagccggaagccagggggcctgtgcagcctccctgtgtagctggccttgactcctttgcctcccacatctgtgaaacagggagcatgaggcacaagtgagctggcaagtggtgctggtgacatcccagctcctgtcctgtgccttcacctctttttttttttttttttttttttgagatggagtctttctctgtcacccaggctggaatgcagtggcgtgatctcggctcactgcaacctccgcctttccaccttccgggttcaagcaactctcctgcctcagcctcccaagtagctgggactataggcgcccgccaccacacccagctaaatttttgtatttttagtagagacagggtttcaccatgtcagccaggatggtcttgatctcctgactttgtgatccgcccgcgtcggcctctcaaagtgctgggattacaggcgtgagccaccgcgcccggctgccttcacctcttaaggagctctgagactccacttctgagagtccctgcggcctcccacctccctgcctttcaaagctctctcccccatgacccaggataaccctatgtctcctcccccagaatccttcagtggctctcatcaccttcaggaaaagcccaaactccttccaccctccaggttcctccctccccacgaggctttgttctcctggggttgcttcctggaccctgaacaagttgtgctctcattggccgggcctggccagcagtgcacagtgcctggcaggttgactctaccatccccggggctggccccgctctcctccgagacccaggctgagcccagtcccctcacccttccttgacttacctccccacctgaggctgactttggggttcccagacaccctacccacacacatgccttgatcatagcacttgcctgcgcttcttcagagtcattaatttgcttctcggcttccccactggactgtgagctgcctgaggtcagggattgcgctttggatggtttccagcctgagcctggtgcttgaacagacgtgtgcaataaatgctcgttaaatgatg

SEQ ID NO: 187 - DNA, 1916 bp, Homo sapiens
  source 1..1916: mol_type = genomic DNA
agttcccgcaagcccagacaatgccggtggaggaatttgtggctggctggatctctggcgctctgggcttggtcctgggacacccgtttgacactgtaaaggtgaggctgcagacccagaccacctaccggggcatcgttgattgcatggtcaagatttaccgccatgagtccgcctactgtctggctccttttgacctcatcaaagtccggctacaaaaccagacagagccaagggcccagccagggagccccccaccccggtaccaggggcccgtgcactgtgcagcctccatcttccgggaggaggggccccgggggctgttccgaggagcctgggccctgacgctgagggacacccccacggtggggatctacttcatcacctatgaagggctctgtcgccagtacacaccagaaggccagaatcccagctcagccacggtgctggtggcagggggctttgcaggcattgcttcctgggtggcagccacgcccttagacatgatcaagtcccggatgcagatggatggactgagacgcagagtgtaccaggggatgctggactgcatggtgagcagcatccggcaggaaggactgggagtcttcttccggggggtcaccatcaacagtgcccgcgcctttcccgtcaatgctgtcaccttcctcagctacgaatatctcctccgctggtggggatgagccctgcggcaatgccagcagctccccatcaggcccacggcctggaggccagtttgagattggaggccaggttgaaagcttgcaaatcagtgcaagaggctcagcccttcctaaccaaggtgcctcccacccgcgcagatctgggctgggcagacacctgtgggagccggaagccagggggcctgtgcagcctccctgtgtagctggccttgactcctttgcctcccacatctgtgaaacagggagcatgaggcacaagtgagctggcaagtggtgctggtgacatcccagctcctgtcctgtgccttcacctctttttttttttttttttttttttgagatggagtctttctctgtcacccaggctggaatgcagtggcgtgatctcggctcactgcaacctccgcctttccaccttccgggttcaagcaactctcctgcctcagcctcccaagtagctgggactataggcgcccgccaccacacccagctaaatttttgtatttttagtagagacagggtttcaccatgtcagccaggatggtcttgatctcctgactttgtgatccgcccgcgtcggcctctcaaagtgctgggattacaggcgtgagccaccgcgcccggctgccttcacctcttaaggagctctgagactccacttctgagagtccctgcggcctcccacctccctgcctttcaaagctctctcccccatgacccaggataaccctatgtctcctcccccagaatccttcagtggctctcatcaccttcaggaaaagcccaaactccttccaccctccaggttcctccctccccacgaggctttgttctcctggggttgcttcctggaccctgaacaagttgtgctctcattggccgggcctggccagcagtgcacagtgcctggcaggttgactctaccatccccggggctggccccgctctcctccgagacccaggctgagcccagtcccctcacccttccttgacttacctccccacctgaggctgactttggggttcccagacaccctacccacacacatgccttgatcatagcacttgcctgcgcttcttcagagtcattaatttgcttctcggcttccccactggactgtgagctgcctgaggtcagggattgcgctttggatggtttccagcctgagcctggtgcttgaacagacgtgtgcaataaatgctcgttaaatgatg

SEQ ID NO: 188 - DNA, 2030 bp, Homo sapiens
  source 1..2030: mol_type = genomic DNA
agttcccgcaagcccagacaatgccggtggaggaatttgtggctggctggatctctggcgctctgggcttggtcctgggacacccgtttgacactgtaaagctcctgggcttcttcaagggaatgagcttccccattgccagcatagctgtggtcaactctgtcctgtttggggtctatagcaacaccctgctggtgctcacggccacctcccaccaggagcggcgggcccagccgcccagctacatgcacatcttcctagcgggctgcaccggggggttcctgcaggcctactgtctggctccttttgacctcatcaaagtccggctacaaaaccagacagagccaagggcccagccagggagccccccaccccggtaccaggggcccgtgcactgtgcagcctccatcttccgggaggaggggccccgggggctgttccgaggagcctgggccctgacgctgagggacacccccacggtggggatctacttcatcacctatgaagggctctgtcgccagtacacaccagaaggccagaatcccagctcagccacggtgctggtggcagggggctttgcaggcattgcttcctgggtggcagccacgcccttagacatgatcaagtcccggatgcagatggatggactgagacgcagagtgtaccaggggatgctggactgcatggtgagcagcatccggcaggaaggactgggagtcttcttccggggggtcaccatcaacagtgcccgcgcctttcccgtcaatgctgtcaccttcctcagctacgaatatctcctccgctggtggggatgagccctgcggcaatgccagcagctccccatcaggcccacggcctggaggccagtttgagattggaggccaggttgaaagcttgcaaatcagtgcaagaggctcagcccttcctaaccaaggtgcctcccacccgcgcagatctgggctgggcagacacctgtgggagccggaagccagggggcctgtgcagcctccctgtgtagctggccttgactcctttgcctcccacatctgtgaaacagggagcatgaggcacaagtgagctggcaagtggtgctggtgacatcccagctcctgtcctgtgccttcacctctttttttttttttttttttttttgagatggagtctttctctgtcacccaggctggaatgcagtggcgtgatctcggctcactgcaacctccgcctttccaccttccgggttcaagcaactctcctgcctcagcctcccaagtagctgggactataggcgcccgccaccacacccagctaaatttttgtatttttagtagagacagggtttcaccatgtcagccaggatggtcttgatctcctgactttgtgatccgcccgcgtcggcctctcaaagtgctgggattacaggcgtgagccaccgcgcccggctgccttcacctcttaaggagctctgagactccacttctgagagtccctgcggcctcccacctccctgcctttcaaagctctctcccccatgacccaggataaccctatgtctcctcccccagaatccttcagtggctctcatcaccttcaggaaaagcccaaactccttccaccctccaggttcctccctccccacgaggctttgttctcctggggttgcttcctggaccctgaacaagttgtgctctcattggccgggcctggccagcagtgcacagtgcctggcaggttgactctaccatccccggggctggccccgctctcctccgagacccaggctgagcccagtcccctcacccttccttgacttacctccccacctgaggctgactttggggttcccagacaccctacccacacacatgccttgatcatagcacttgcctgcgcttcttcagagtcattaatttgcttctcggcttccccactggactgtgagctgcctgaggtcagggattgcgctttggatggtttccagcctgagcctggtgcttgaacagacgtgtgcaataaatgctcgttaaatgatg

SEQ ID NO: 189 - DNA, 2320 bp, Homo sapiens
  source 1..2320: mol_type = genomic DNA
gactgagcagaatggtgccattgcagatcaacacgcactttaaataatcaaaacccctatctttcccctgggaaggaggaagccgaggaaggctgtgtttctgactcacacgggggagtcgggggagtcgtaaacaaccctgaagagaacagccaggcctgttcccgcaagcccagacaatgccggtggaggaatttgtggctggctggatctctgacttgcttcctgggcctggcacgagggccctcactcatagcaccctcttgtcaccacaggcgctctgggcttggtcctgggacacccgtttgacactgtaaaggtgaggctgcagacccagaccacctaccggggcatcgttgattgcatggtcaagatttaccgccatgagtccctcctgggcttcttcaagggaatgagcttccccattgccagcatagctgtggtcaactctgtcctgtttggggtctatagcaacaccctgctggtgctcacggccacctcccaccaggagcggcgggcccagccgcccagctacatgcacatcttcctagcgggctgcaccggggggttcctgcaggcctactgtctggctccttttgacctcatcaaagtccggctacaaaaccagacagagccaagggcccagccagggagccccccaccccggtaccaggggcccgtgcactgtgcagcctccatcttccgggaggaggggccccgggggctgttccgaggagcctgggccctgacgctgagggacacccccacggtggggatctacttcatcacctatgaagggctctgtcgccagtacacaccagaaggccagaatcccagctcagccacggtgctggtggcagggggctttgcaggcattgcttcctgggtggcagccacgcccttagacatgatcaagtcccggatgcagatggatggactgagacgcagagtgtaccaggggatgctggactgcatggtgagcagcatccggcaggaaggactgggagtcttcttccggggggtcaccatcaacagtgcccgcgcctttcccgtcaatgctgtcaccttcctcagctacgaatatctcctccgctggtggggatgagccctgcggcaatgccagcagctccccatcaggcccacggcctggaggccagtttgagattggaggccaggttgaaagcttgcaaatcagtgcaagaggctcagcccttcctaaccaaggtgcctcccacccgcgcagatctgggctgggcagacacctgtgggagccggaagccagggggcctgtgcagcctccctgtgtagctggccttgactcctttgcctcccacatctgtgaaacagggagcatgaggcacaagtgagctggcaagtggtgctggtgacatcccagctcctgtcctgtgccttcacctctttttttttttttttttttttttgagatggagtctttctctgtcacccaggctggaatgcagtggcgtgatctcggctcactgcaacctccgcctttccaccttccgggttcaagcaactctcctgcctcagcctcccaagtagctgggactataggcgcccgccaccacacccagctaaatttttgtatttttagtagagacagggtttcaccatgtcagccaggatggtcttgatctcctgactttgtgatccgcccgcgtcggcctctcaaagtgctgggattacaggcgtgagccaccgcgcccggctgccttcacctcttaaggagctctgagactccacttctgagagtccctgcggcctcccacctccctgcctttcaaagctctctcccccatgacccaggataaccctatgtctcctcccccagaatccttcagtggctctcatcaccttcaggaaaagcccaaactccttccaccctccaggttcctccctccccacgaggctttgttctcctggggttgcttcctggaccctgaacaagttgtgctctcattggccgggcctggccagcagtgcacagtgcctggcaggttgactctaccatccccggggctggccccgctctcctccgagacccaggctgagcccagtcccctcacccttccttgacttacctccccacctgaggctgactttggggttcccagacaccctacccacacacatgccttgatcatagcacttgcctgcgcttcttcagagtcattaatttgcttctcggcttccccactggactgtgagctgcctgaggtcagggattgcgctttggatggtttccagcctgagcctggtgcttgaacagacgtgtgcaataaatgctcgttaaatgatg

SEQ ID NO: 190 - DNA, 2261 bp, Homo sapiens
  source 1..2261: mol_type = genomic DNA
gactgagcagaatggtgccattgcagatcaacacgcactttaaataatcaaaacccctatctttcccctgggaaggaggaagccgaggaaggctgtgtttctgactcacacgggggagtcgggggagtcgtaaacaaccctgaagagaacagccaggcctgttcccgcaagcccagacaatgccggtggaggaatttgtggctggctggatctctggcgctctgggcttggtcctgggacacccgtttgacactgtaaaggtgaggctgcagacccagaccacctaccggggcatcgttgattgcatggtcaagatttaccgccatgagtccctcctgggcttcttcaagggaatgagcttccccattgccagcatagctgtggtcaactctgtcctgtttggggtctatagcaacaccctgctggtgctcacggccacctcccaccaggagcggcgggcccagccgcccagctacatgcacatcttcctagcgggctgcaccggggggttcctgcaggcctactgtctggctccttttgacctcatcaaagtccggctacaaaaccagacagagccaagggcccagccagggagccccccaccccggtaccaggggcccgtgcactgtgcagcctccatcttccgggaggaggggccccgggggctgttccgaggagcctgggccctgacgctgagggacacccccacggtggggatctacttcatcacctatgaagggctctgtcgccagtacacaccagaaggccagaatcccagctcagccacggtgctggtggcagggggctttgcaggcattgcttcctgggtggcagccacgcccttagacatgatcaagtcccggatgcagatggatggactgagacgcagagtgtaccaggggatgctggactgcatggtgagcagcatccggcaggaaggactgggagtcttcttccggggggtcaccatcaacagtgcccgcgcctttcccgtcaatgctgtcaccttcctcagctacgaatatctcctccgctggtggggatgagccctgcggcaatgccagcagctccccatcaggcccacggcctggaggccagtttgagattggaggccaggttgaaagcttgcaaatcagtgcaagaggctcagcccttcctaaccaaggtgcctcccacccgcgcagatctgggctgggcagacacctgtgggagccggaagccagggggcctgtgcagcctccctgtgtagctggccttgactcctttgcctcccacatctgtgaaacagggagcatgaggcacaagtgagctggcaagtggtgctggtgacatcccagctcctgtcctgtgccttcacctctttttttttttttttttttttttgagatggagtctttctctgtcacccaggctggaatgcagtggcgtgatctcggctcactgcaacctccgcctttccaccttccgggttcaagcaactctcctgcctcagcctcccaagtagctgggactataggcgcccgccaccacacccagctaaatttttgtatttttagtagagacagggtttcaccatgtcagccaggatggtcttgatctcctgactttgtgatccgcccgcgtcggcctctcaaagtgctgggattacaggcgtgagccaccgcgcccggctgccttcacctcttaaggagctctgagactccacttctgagagtccctgcggcctcccacctccctgcctttcaaagctctctcccccatgacccaggataaccctatgtctcctcccccagaatccttcagtggctctcatcaccttcaggaaaagcccaaactccttccaccctccaggttcctccctccccacgaggctttgttctcctggggttgcttcctggaccctgaacaagttgtgctctcattggccgggcctggccagcagtgcacagtgcctggcaggttgactctaccatccccggggctggccccgctctcctccgagacccaggctgagcccagtcccctcacccttccttgacttacctccccacctgaggctgactttggggttcccagacaccctacccacacacatgccttgatcatagcacttgcctgcgcttcttcagagtcattaatttgcttctcggcttccccactggactgtgagctgcctgaggtcagggattgcgctttggatggtttccagcctgagcctggtgcttgaacagacgtgtgcaataaatgctcgttaaatgatg

SEQ ID NO: 191 - DNA, 2206 bp, Homo sapiens
  source 1..2206: mol_type = genomic DNA
gactgagcagaatggtgccattgcagatcaacacgcactttaaataatcaaaacccctatctttcccctgggaaggaggaagccgaggaaggctgtgtttctgactcacacgggggagtcgggggagtcgtaaacaaccctgaagagaacagccaggcctggcgctctgggcttggtcctgggacacccgtttgacactgtaaaggtgaggctgcagacccagaccacctaccggggcatcgttgattgcatggtcaagatttaccgccatgagtccctcctgggcttcttcaagggaatgagcttccccattgccagcatagctgtggtcaactctgtcctgtttggggtctatagcaacaccctgctggtgctcacggccacctcccaccaggagcggcgggcccagccgcccagctacatgcacatcttcctagcgggctgcaccggggggttcctgcaggcctactgtctggctccttttgacctcatcaaagtccggctacaaaaccagacagagccaagggcccagccagggagccccccaccccggtaccaggggcccgtgcactgtgcagcctccatcttccgggaggaggggccccgggggctgttccgaggagcctgggccctgacgctgagggacacccccacggtggggatctacttcatcacctatgaagggctctgtcgccagtacacaccagaaggccagaatcccagctcagccacggtgctggtggcagggggctttgcaggcattgcttcctgggtggcagccacgcccttagacatgatcaagtcccggatgcagatggatggactgagacgcagagtgtaccaggggatgctggactgcatggtgagcagcatccggcaggaaggactgggagtcttcttccggggggtcaccatcaacagtgcccgcgcctttcccgtcaatgctgtcaccttcctcagctacgaatatctcctccgctggtggggatgagccctgcggcaatgccagcagctccccatcaggcccacggcctggaggccagtttgagattggaggccaggttgaaagcttgcaaatcagtgcaagaggctcagcccttcctaaccaaggtgcctcccacccgcgcagatctgggctgggcagacacctgtgggagccggaagccagggggcctgtgcagcctccctgtgtagctggccttgactcctttgcctcccacatctgtgaaacagggagcatgaggcacaagtgagctggcaagtggtgctggtgacatcccagctcctgtcctgtgccttcacctctttttttttttttttttttttttgagatggagtctttctctgtcacccaggctggaatgcagtggcgtgatctcggctcactgcaacctccgcctttccaccttccgggttcaagcaactctcctgcctcagcctcccaagtagctgggactataggcgcccgccaccacacccagctaaatttttgtatttttagtagagacagggtttcaccatgtcagccaggatggtcttgatctcctgactttgtgatccgcccgcgtcggcctctcaaagtgctgggattacaggcgtgagccaccgcgcccggctgccttcacctcttaaggagctctgagactccacttctgagagtccctgcggcctcccacctccctgcctttcaaagctctctcccccatgacccaggataaccctatgtctcctcccccagaatccttcagtggctctcatcaccttcaggaaaagcccaaactccttccaccctccaggttcctccctccccacgaggctttgttctcctggggttgcttcctggaccctgaacaagttgtgctctcattggccgggcctggccagcagtgcacagtgcctggcaggttgactctaccatccccggggctggccccgctctcctccgagacccaggctgagcccagtcccctcacccttccttgacttacctccccacctgaggctgactttggggttcccagacaccctacccacacacatgccttgatcatagcacttgcctgcgcttcttcagagtcattaatttgcttctcggcttccccactggactgtgagctgcctgaggtcagggattgcgctttggatggtttccagcctgagcctggtgcttgaacagacgtgtgcaataaatgctcgttaaatgatg

SEQ ID NO: 192 - DNA, 2020 bp, Homo sapiens
  source 1..2020: mol_type = genomic DNA
gactgagcagaatggtgccattgcagatcaacacgcactttaaataatcaaaacccctatctttcccctgggaaggaggaagccgaggaaggctgtgtttctgactcacacgggggagtcgggggagtcgtaaacaaccctgaagagaacagccaggcctggcgctctgggcttggtcctgggacacccgtttgacactgtaaaggtgaggctgcagacccagaccacctaccggggcatcgttgattgcatggtcaagatttaccgccatgagtccgcctactgtctggctccttttgacctcatcaaagtccggctacaaaaccagacagagccaagggcccagccagggagccccccaccccggtaccaggggcccgtgcactgtgcagcctccatcttccgggaggaggggccccgggggctgttccgaggagcctgggccctgacgctgagggacacccccacggtggggatctacttcatcacctatgaagggctctgtcgccagtacacaccagaaggccagaatcccagctcagccacggtgctggtggcagggggctttgcaggcattgcttcctgggtggcagccacgcccttagacatgatcaagtcccggatgcagatggatggactgagacgcagagtgtaccaggggatgctggactgcatggtgagcagcatccggcaggaaggactgggagtcttcttccggggggtcaccatcaacagtgcccgcgcctttcccgtcaatgctgtcaccttcctcagctacgaatatctcctccgctggtggggatgagccctgcggcaatgccagcagctccccatcaggcccacggcctggaggccagtttgagattggaggccaggttgaaagcttgcaaatcagtgcaagaggctcagcccttcctaaccaaggtgcctcccacccgcgcagatctgggctgggcagacacctgtgggagccggaagccagggggcctgtgcagcctccctgtgtagctggccttgactcctttgcctcccacatctgtgaaacagggagcatgaggcacaagtgagctggcaagtggtgctggtgacatcccagctcctgtcctgtgccttcacctctttttttttttttttttttttttgagatggagtctttctctgtcacccaggctggaatgcagtggcgtgatctcggctcactgcaacctccgcctttccaccttccgggttcaagcaactctcctgcctcagcctcccaagtagctgggactataggcgcccgccaccacacccagctaaatttttgtatttttagtagagacagggtttcaccatgtcagccaggatggtcttgatctcctgactttgtgatccgcccgcgtcggcctctcaaagtgctgggattacaggcgtgagccaccgcgcccggctgccttcacctcttaaggagctctgagactccacttctgagagtccctgcggcctcccacctccctgcctttcaaagctctctcccccatgacccaggataaccctatgtctcctcccccagaatccttcagtggctctcatcaccttcaggaaaagcccaaactccttccaccctccaggttcctccctccccacgaggctttgttctcctggggttgcttcctggaccctgaacaagttgtgctctcattggccgggcctggccagcagtgcacagtgcctggcaggttgactctaccatccccggggctggccccgctctcctccgagacccaggctgagcccagtcccctcacccttccttgacttacctccccacctgaggctgactttggggttcccagacaccctacccacacacatgccttgatcatagcacttgcctgcgcttcttcagagtcattaatttgcttctcggcttccccactggactgtgagctgcctgaggtcagggattgcgctttggatggtttccagcctgagcctggtgcttgaacagacgtgtgcaataaatgctcgttaaatgatg

SEQ ID NO: 193 - DNA, 3091 bp, Homo sapiens
  source 1..3091: mol_type = genomic DNA
actgcaacagctgcctctcgggttcaagcgattctcctgcctcagcatcccaagtagctgggactacaggcgcccgtcatcacacccggctaatttttgtatttttggtagagatggggtttcactatgttggtcaggctggtctcgaactcctgacctcaggtggtccttccgcctcggcctcccaaagtgctgggattacaggcgtgagccactgcgcctggcctgtatcagttatagtttttgcaaaggcagtttcaggaataagaagcagaaccaggactgcagcccaagccaccacgagaggccagtctttggggatggtcttttaggatgatctttgggggtggcccaaggagccccaggcagctccagaggcaggagtcactcaggatttattgagagcccaccctgtgccacccgctgtgcacagaacacccagagatccctgtccagacagacaagttcttcccatcgtatgttggcgtgataactgtgatggagaaagagaggaagagccagcagtgcctccggctggggaggcggggcagacctcacccaggtggtgacatttgagccccagctggaggggtgccagggcaagagtgcccaggaagagggaagagccagtccacaggcctggagacagaaggctgactgaagaagagtctggaggctcgggtggctgcagcagagaaagcaagggggaggaagccgaggaaggctgtgtttctgactcacacgggggagtcgggggagtcgtaaacaaccctgaagagaacagccaggcctgttcccgcaagcccagacaatgccggtggaggaatttgtggctggctggatctctggtgagacatttttcttccttctgtcacatcacacccaatgggccctgcagttctgcgtggccagctggcagcagggcctgctctggatcccggcgacgacattatgagttgaagaaagaagagtaaagctctcggagagacttgcttcctgggcctggcacgagggccctcactcatagcaccctcttgtcaccacaggcgctctgggcttggtcctgggacacccgtttgacactgtaaaggtgaggctgcagacccagaccacctaccggggcatcgttgattgcatggtcaagatttaccgccatgagtccctcctgggcttcttcaagggaatgagcttccccattgccagcatagctgtggtcaactctgtcctgtttggggtctatagcaacaccctgctggtgctcacggccacctcccaccaggagcggcgggcccagccgcccagctacatgcacatcttcctagcgggctgcaccggggggttcctgcaggcctactgtctggctccttttgacctcatcaaagtccggctacaaaaccagacagagccaagggcccagccagggagccccccaccccggtaccaggggcccgtgcactgtgcagcctccatcttccgggaggaggggccccgggggctgttccgaggagcctgggccctgacgctgagggacacccccacggtggggatctacttcatcacctatgaagggctctgtcgccagtacacaccagaaggccagaatcccagctcagccacggtgctggtggcagggggctttgcaggcattgcttcctgggtggcagccacgcccttagacatgatcaagtcccggatgcagatggatggactgagacgcagagtgtaccaggggatgctggactgcatggtgagcagcatccggcaggaaggactgggagtcttcttccggggggtcaccatcaacagtgcccgcgcctttcccgtcaatgctgtcaccttcctcagctacgaatatctcctccgctggtggggatgagccctgcggcaatgccagcagctccccatcaggcccacggcctggaggccagtttgagattggaggccaggttgaaagcttgcaaatcagtgcaagaggctcagcccttcctaaccaaggtgcctcccacccgcgcagatctgggctgggcagacacctgtgggagccggaagccagggggcctgtgcagcctccctgtgtagctggccttgactcctttgcctcccacatctgtgaaacagggagcatgaggcacaagtgagctggcaagtggtgctggtgacatcccagctcctgtcctgtgccttcacctctttttttttttttttttttttttgagatggagtctttctctgtcacccaggctggaatgcagtggcgtgatctcggctcactgcaacctccgcctttccaccttccgggttcaagcaactctcctgcctcagcctcccaagtagctgggactataggcgcccgccaccacacccagctaaatttttgtatttttagtagagacagggtttcaccatgtcagccaggatggtcttgatctcctgactttgtgatccgcccgcgtcggcctctcaaagtgctgggattacaggcgtgagccaccgcgcccggctgccttcacctcttaaggagctctgagactccacttctgagagtccctgcggcctcccacctccctgcctttcaaagctctctcccccatgacccaggataaccctatgtctcctcccccagaatccttcagtggctctcatcaccttcaggaaaagcccaaactccttccaccctccaggttcctccctccccacgaggctttgttctcctggggttgcttcctggaccctgaacaagttgtgctctcattggccgggcctggccagcagtgcacagtgcctggcaggttgactctaccatccccggggctggccccgctctcctccgagacccaggctgagcccagtcccctcacccttccttgacttacctccccacctgaggctgactttggggttcccagacaccctacccacacacatgccttgatcatagcacttgcctgcgcttcttcagagtcattaatttgcttctcggcttccccactggactgtgagctgcctgaggtcagggattgcgctttggatggtttccagcctgagcctggtgcttgaacagacgtgtgcaataaatgctcgttaaatgatg

SEQ ID NO: 194 - DNA, 5349 bp, Homo sapiens
  source 1..5349: mol_type = genomic DNA
cttccctgtggcaggacttgggagcagtttccagccagaggctgccttgccaggggtggagaggacaaaggggaggccccacggtgcctactccgctgccactgtgtctctctgcagctcctgggcttcttcaagggaatgagcttccccattgccagcatagctgtggtcaactctgtcctgtttggggtctatagcaacaccctgctggtgctcacggccacctcccaccaggagcggcgggcccagccgcccagctacatgcacatcttcctagcgggctgcaccggggggttcctgcaggtgagggggcagtgagtgggcacacacaggtgtcatagggatggtcatctcgatctgtcctctcccaccctgccctggcgacccacagctgtggaggcataggcctcttggacgggaacaagaggcctgtgctatggccttccaggctgcaggcctctgggggagggctgtggggaacagagggggcaaaaggcagagacagctggtgggcagtgccaagagggtgctgggagaagcagcctgggccactcgctccagctgacggggcttgcccccctccagaggggtctgccaccctcagagctgtgggggagcccactccccaaggagacctttgaccctggagaaccaccagcaccccgcagagctgtgagcccagcccctctggccgggtcctgatgaggtcctgacactcccctggccctgcctggctctacactttgcctgcagtgcttgggtgcccatgacctgggagcctcacctgaggcccagcccagcagggcattaaccattcaggcactgccgtcatctgggctttgggctttagaggggtggatggagggaagagggaccagctgccgccagtgggaaccggtgctgaatgggtcctgtgagcataagcagggagagggtgcgcccggcacccactgacaccccagccgcaagccagggtcgccctctcctgggcagctgcccccagttccttgtcacacttcatggggcagagagcaaggacaaaggacaaagtcaggctgctccttcaaatgaattaatgattaatgagacccccggaggccccggcttttcttctgccccttcttgtgcgaggtgccacctataggtttcctgagccccgcgagccacatcccacaaacacaaggaagagaaccgaagccctaagctaagtggccaggcccggcttctaagtcaccctgcccccccagctctttggaaagcagaagtggggactgtgagggccgctgatggagcctgggtttacagtgaaacctgtggctttagtttaacagagtcttaaaggaaaaatgtgttttagtgtggagtgggaagaagaggcagggactgacagcctctgacgggcacagacgttgccctggtcttcgccgaagctgaccttctgaaatggcatctgacactccaccacccctgtgggggtgtctgtcacctggtgtcagcctagccctgtcctcagcccccaggagctcagggctcagaacacctcctgaagccctgagctcagccctgccagcacgctctagagggtggcacaaggccccatctcccaagggatggtacctaacctacgacccttactcctgggaccaaagtaaacaagcgaagacttggcctgccacaccctaagtaccaccacccaccaccagaggcgaccgccagcccccgtcgccatcagccatctccagggctgaggaactgagcccatgtacctgtcacaaaacaaacaagcaaaaaacagataaatccctcagagacaggctagccttgacatggaccccgattctcacctggactccaaaagctatcttgacctactggcatctctgacccaaatcttaattgcccccatcgccctctacatccccccagcactgaccctcaccaggactccagccccaattccatcccaaatctgtgtagcatctgcttctgccgattctaagagccctagcacctgccaagtccccccattacccaccttcccacactcagaagcctctttggtgggatgctaatgggaaggagtcttgcctctctggaggcaggaggggctggccttgtgcccctccgggcctctgagaggtgggcgcaggagaacagcactcacgaggggacctccttcaccctgggaaagggtggtttctttgctatttcacagtcacaggctgaatccttcacttggccctgcccaccgtacaggtatgctcactgccggctttagggaggccagaaaccaacctgctcctgcaaaaagaatccaggcttgttctgagtgcctgctgtaggccaggcaagttggtcactgttgcatgaggggcagtgcctctcactcttgggcctgatgccaagggaggtggcctgtcccggtcgcatgcagacatcctggccatcccagccacacatgcacgtgagaggctgggtgccggcagggttcctgagggactggaagatgtggccccctgcctgcctccttcctcttgtgaatataaggggccagttcccagcccaaagccccacccggggccctcatgtttcatcaccaacaggcctactgtctggctccttttgacctcatcaaagtccggctacaaaaccagacagagccaagggcccagccagggagccccccaccccggtaccaggggcccgtgcactgtgcagcctccatcttccgggaggaggggccccgggggctgttccgaggagcctgggccctgacgctgagggacacccccacggtggggatctacttcatcacctatgaagggctctgtcgccagtacacaccagaaggccagaatcccagctcagccacggtgctggtggcagggggctttgcaggcattgcttcctgggtggcagccacgcccttagacgtgatcaagtcccggatgcagatggatggactgagacgcagagtgtaccaggggatgctggactgcatggtgagcagcatccggcaggaaggactgggagtcttcttccggggggtcaccatcaacagtgcccgcgcctttcccgtcaatgctgtcaccttcctcagctacgaatatctcctccgctggtggggatgagccctgcggcaatgccagcagctccccatcaggcccacggcctggaggccagtttgagattggaggccaggttgaaagcttgcaaatcagtgcaagaggctcagcccttcctaaccaaggtgcctcccacccgcgcagatctgggctgggcagacacctgtgggagccggaagccagggggcctgtgcagcctccctgtgtagctggccttgactcctttgcctcccacatctgtgaaacagggagcatgaggcacaagtgagctggcaagtggtgctggtgacatcccagctcctgtcctgtgccttcacctcttttttttttttttttttttttgggatggagtctttctctgtcacccaggctggagtgcagtggcgtgatctcggctcactgcaacctccgcctttccaccttccgggttcaagcaactctcctgcctcagcctcccaagtagctgggactataggcgcccgccaccacacccggctaaatttttgtatttttagtagagacggggtttcaccatgtcggccaggatggtcttgatctcctgactttgtgatccgcccgcgtcggcctcccaaagtgctgagattaacaggcgtgagccaccacccccagctttcctctgtgatcccttctgatcggaccatctctgagcccatccagcaccaccgcagcgccagggattccaggctggacattgcagcgatggtacagcaggtgtcagaacaccactgggcagcccgtggctggaaggaagcaaacaggacgcatgaggaggaggaggtgggctcctataaacagtgcaggaagtaggcaggaggacaggtcagtgtggtcctctgttgtttgctatttctcatcaaattaccagttagcgggaattcccatttgggtgcccctctgtctgagagagagctgttctccttttccctttgcctattaaacctctgctcctaaactcaaaacaacaacaacaaaacagcaagggagtaaaatgaaaaaaatctattttttttggctttagttaaatgggctcccattctccctctctggttctatctagaggagtctcctaaagagcctggagtgcccgtcctctaaactccacctttacagccagagagagtggccagactcaggtgggaccagggagttccaggcccaagttccttccaccaatccatggcaaaggctacccactgggctgggagaacagtcctggagtgagtttagggtttagtatggtgtgattagtgagcaaataactcactcctgcacagtggccccaggaggagatgccactattggaggggagggcagaaagacaaagatggggcaggaaggggccggagagattctaaaaatctagatgttggctaggcatggtggctctcatctgtaatcctagcactttgggatgccaaggtgggcggatcacctggagtcaggagttcgagaccagcctggccgatatggtgaaaccccgtctctactaaaaacacaaagattagccgggcgtggtggcacatgcctgtagtcccagctactggggaggctgaggcaggagaatctcttgaacccaggtggtggaggttgaagtgagctgagattgccccactgcactccagactgggtgacagagagagactctatctcaaaaaacacaaaatttagccgggcttcgtggctcatgcctgtgatctcagcactttgggaggccaaggtgggcagatcacgaggtcaggagatcgagaccatcctggctaacacggtgaaacgccgtctctactaaaaatacaaagagttggccgggcatggtggcacgcacctgtggtcacagttacttgggaggctgaggcaggagaatcacccgaaccagagaggcggaggttgcggtgagccgaaatcgcgccattgcactccaggctggatgacagagcgagacttcgtctcaaaaaaaagaaaacaaaactagatgtttttaatcagcagggtctcataaggcatgcgaaattgcttaaggatttaacagatggtatctcaggttgctgttatttttgagaactcttttcgacagaagaaatccctaagaaccaggagatagtctgtgaacctgctttgaggttacaaaggaggtggtgtctgtcagtcacttgcaaagagctgataacttgagcaaacatgttaaataaagtcccattggactcct

SEQ ID NO: 195 - DNA, 2275 bp, Homo sapiens
  source 1..2275: mol_type = genomic DNA
gaatggtgccattgcagatcaacacgcactttaaataatcaaaacccctatctttcccctgggaaggaggaagccgaggaaggctgtgtttctgactcacacgggggagtcgggggagtcgtaaacaaccctgaagagaacagccaggcctggcgctctgggcttggtcctgggacacccgtttgacactgtaaaggtgaggctgcagacccagaccacctaccggggcatcgttgattgcatggtcaagatttaccgccatgagtccctcctgggcttcttcaagggaatgagcttccccattgccagcatagctgtggtcaactctgtcctgtttggggtctatagcaacaccctgctggtgctcacggccacctcccaccaggagcggcgggcccagccgcccagctacatgcacatcttcctagcgggctgcaccggggggttcctgcaggcctactgtctggctccttttgacctcatcaaagtccggctacaaaaccagacagagccaagggcccagccagggagccccccaccccggtaccaggggcccgtgcactgtgcagcctccatcttccgggaggaggggccccgggggctgttccgaggagcctgggccctgacgctgagggacacccccacggtggggatctacttcatcacctatgaagggctctgtcgccagtacacaccagaaggccagaatcccagctcagccacggtgctggtggcagggggctttgcaggcattgcttcctgggtggcagccacgcccttagacgtgatcaagtcccggatgcagatggatggactgagacgcagagtgtaccaggggatgctggactgcatggtgagcagcatccggcaggaaggactgggagtcttcttccggggggtcaccatcaacagtgcccgcgcctttcccgtcaatgctgtcaccttcctcagctacgaatatctcctccgctggtggggatgagccctgcggcaatgccagcagctccccatcaggcccacggcctggaggccagtttgagattggaggccaggttgaaagcttgcaaatcagtgcaagaggctcagcccttcctaaccaaggtgcctcccacccgcgcagatctgggctgggcagacacctgtgggagccggaagccagggggcctgtgcagcctccctgtgtagctggccttgactcctttgcctcccacatctgtgaaacagggagcatgaggcacaagtgagctggcaagtggtgctggtgacatcccagctcctgtcctgtgccttcacctctttttttttttttttttttttttttttgagatggagtctttctctgtcacccaggctggaatgcagtggcgtgatctcggctcactgcaacctccgcctttccaccttccgggttcaagcaactctcctgcctcagcctcccaagtagctgggactataggcgcccgccaccacacccagctaaatttttgtatttttagtagagacagggtttcaccatgtcagccaggatggtcttgatctcctgactttgtgatccgcccgcgtcggcctctcaaagtgctgggattacaggcgtgagccaccgcgcccggctgccttcacctcttaaggagctctgagactccacttctgagagtccctgcggcctcccacctccctgcctttcaaagctctctcccccatgacccaggataaccctatgtctcctcccccagaatccttcagtggctctcatcaccttcaggaaaagcccaaactccttccaccctccaggttcctccctccccacgaggctttgttctcctggggttgcttcctggaccctgaacaagttgtgctctcattggccgggcctggccagcagtgcacagtgcctggcaggttgactctaccatccccggggctggccccgctctcctccgagacccaggctgagcccagtcccctcacccttccttgacttacctccccacctgaggctgactttggggttcccagacaccctacccacacacatgccttgatcatagcacttgcctgcgcttcttcagagtcattaatttgcttctcggcttccccactggactgtgagctgcctgaggtcagggattgcgctttggatggtttccagcctgagcctggtgcttgaacagacgtgtgcaataaatgctcgttaaatgaaaaaaaaaaaaaaaaaaaaaaaaaaaaaaaaaaaaaaaaaaaaaaaaaaaaaaaaaaaaaaaaaaaaaaaaaaaaa

SEQ ID NO: 196 - DNA, 3088 bp, Homo sapiens
  source 1..3088: mol_type = genomic DNA
actgcaacagctgcctctcgggttcaagcgattctcctgcctcagcatcccaagtagctgggactacaggcgcccgtcatcacacccggctaatttttgtatttttggtagagatggggtttcactatgttggtcaggctggtctcgaactcctgacctcaggtggtccttccgcctcggcctcccaaagtgctgggattacaggcgtgagccactgcgcctggcctgtatcagttatagtttttgcaaaggcagtttcaggaataagaagcagaaccaggactgcagcccaagccaccacgagaggccagtctttggggatggtcttttaggatgatctttgggggtggcccaaggagccccaggcagctccagaggcaggagtcactcaggatttattgagagcccaccctgtgccacccgctgtgcacagaacacccagagatccctgtccagacagacaagttcttcccatcgtatgttggcgtgataactgtgatggagaaagagaggaagagccagcagtgcctccggctggggaggcggggcagacctcacccaggtggtgacatttgagccccagctggaggggtgccagggcaagagtgcccaggaagagggaagagccagtccacaggcctggagacagaaggctgactgaagaagagtctggaggctcgggtggctgcagcagagaaagcaagggggaggaagccgaggaaggctgtgtttctgactcacacgggggagtcgggggagtcgtaaacaaccctgaagagaacagccaggcctgttcccgcaagcccagacaatgccggtggaggaatttgtggctggctggatctctggtgagacatttttcttccttctgtcacatcacacccaatgggccctgcagttctgcgtggccagctggcagcagggcctgctctggatcccggcgacgacattatgagttgaagaaagaagagtaaagctctcggagagacttgcttcctgggcctggcacgagggccctcactcatagcaccctcttgtcaccacaggcgctctgggcttggtcctgggacacccgtttgacactgtaaaggtgaggctgcagacccagaccacctaccggggcatcgttgattgcatggtcaagatttaccgccatgagtccctcctgggcttcttcaagggaatgagcttccccattgccagcatagctgtggtcaactctgtcctgtttggggtctatagcaacaccctgctggtgctcacggccacctcccaccaggagcggcgggcccagccgcccagctacatgcacatcttcctagcgggctgcaccggggggttcctgcaggcctactgtctggctccttttgacctcatcaaagtccggctacaaaaccagacagagccaagggcccagccagggagccccccaccccggtaccaggggcccgtgcactgtgcagcctccatcttccgggaggaggggccccgggggctgttccgaggagcctgggccctgacgctgagggacacccccacggtggggatctacttcatcacctatgaagggctctgtcgccagtacacaccagaaggccagaatcccagctcagccacggtgctggtggcagggggctttgcaggcattgcttcctgggtggcagccacgcccttagacgtgatcaagtcccggatgcagatggatggactgagacgcagagtgtaccaggggatgctggactgcatggtgagcagcatccggcaggaaggactgggagtcttcttccggggggtcaccatcaacagtgcccgcgcctttcccgtcaatgctgtcaccttcctcagctacgaatatctcctccgctggtggggatgagccctgcggcaatgccagcagctccccatcaggcccacggcctggaggccagtttgagattggaggccaggttgaaagcttgcaaatcagtgcaagaggctcagcccttcctaaccaaggtgcctcccacccgcgcagatctgggctgggcagacacctgtgggagccggaagccagggggcctgtgcagcctccctgtgtagctggccttgactcctttgcctcccacatctgtgaaacagggagcatgaggcacaagtgagctggcaagtggtgctggtgacatcccagctcctgtcctgtgccttcacctctttttttttttttttttttttttgagatggagtctttctctgtcacccaggctggagtgcagtggcgtgatctcggctcactgcaacctccgcctttccaccttccgggttcaggcaactctcctgcctcagcctcccaagtggctgggactgtaggcgcccgccaccacacccagctggatttttgtatttttggtagagacagggtttcgccatgtcggccaggatggtcttgatctcctgactttgtgatccgcccgcgtcggcctctcaaagtgctgggattacaggcgtgagccaccgcgcccggctgccttcacctcttaaggagctctgagactccacttctgagagtccctgcggcctcccacctccctgcctttcaaagctctctcccccatgacccaggataaccctatgtctcctcccccagaatccttcagtggctctcatcaccttcaggaaaagcccaaactccttccaccctccaggttcctccctccccacgaggctttgttctcctggggttgcttcctggaccctgaacaagttgtgctctcattggccgggcctggccagcagtgcacagtgcctggcaggttgactctaccatccccggggctggccccgctctcctccgagacccaggctgagcccagtcccctcacccttccttgacttacctccccacctgaggctgactttggggttcccagacaccctacccacacacatgccttgatcatagcacttgcctgcgcttcttcagagtcattaatttgcttctcggcttccccactggactgtgagctgcctgaggtcagggattgcgctttggatggtttccagcctgagcctggtgcttgaacagacgtgtgcaataaatgctcgttaaatg

SEQ ID NO: 197 - DNA, 561 bp, Homo sapiens
  source 1..561: mol_type = genomic DNA
cacagatccttgaaagggttttggttttgactgagcagaatggtgccattgcagatcaacacgcactttaaataatcaaaacccctatctttcccctgggaaggaggaagccgaggaaggctgtgtttctgactcacacgggggagtcgggggagtcgtaaacaaccctgaagagaacagccaggcctgttcccgcaagcccagacaatgccggtggaggaatttgtggctggctggatctctggcgctctgggcttggtcctgggacacccgtttgacactgtaaaggtgaggctgcagacccagaccacctaccggggcatcgttgattgcatggtcaagatttaccgccatgagtccctcctgggcttcttcaagggaatgagcttccccattgccagcatagctgtggtcaactctgtcctgtttggggtctatagcaacaccctgctggtgctcacggccacctcccaccaggagcggcgggcccagccgcccagctacatgcacatcttcctagcgggctgcaccggggggttcctgcaggcctactgtctggct

SEQ ID NO: 198 - protein, 288 aa, Homo sapiens
MPVEEFVAGWISGALGLVLGHPFDTVKVRLQTQTTYRGIVDCMVKIYRHESLLGFFKGMSFPIASIAVVNSVLFGVYSNTLLVLTATSHQERRAQPPSYMHIFLAGCTGGFLQAYCLAPFDLIKVRLQNQTEPRAQPGSPPPRYQGPVHCAASIFREEGPRGLFRGAWALTLRDTPTVGIYFITYEGLCRQYTPEGQNPSSATVLVAGGFAGIASWVAATPLDMIKSRMQMDGLRRRVYQGMLDCMVSSIRQEGLGVFFRGVTINSARAFPVNAVTFLSYEYLLRWWG

SEQ ID NO: 199 - protein, 226 aa, Homo sapiens
MPVEEFVAGWISGALGLVLGHPFDTVKVRLQTQTTYRGIVDCMVKIYRHESAYCLAPFDLIKVRLQNQTEPRAQPGSPPPRYQGPVHCAASIFREEGPRGLFRGAWALTLRDTPTVGIYFITYEGLCRQYTPEGQNPSSATVLVAGGFAGIASWVAATPLDMIKSRMQMDGLRRRVYQGMLDCMVSSIRQEGLGVFFRGVTINSARAFPVNAVTFLSYEYLLRWWG

SEQ ID NO: 200 - protein, 264 aa, Homo sapiens
MPVEEFVAGWISGALGLVLGHPFDTVKLLGFFKGMSFPIASIAVVNSVLFGVYSNTLLVLTATSHQERRAQPPSYMHIFLAGCTGGFLQAYCLAPFDLIKVRLQNQTEPRAQPGSPPPRYQGPVHCAASIFREEGPRGLFRGAWALTLRDTPTVGIYFITYEGLCRQYTPEGQNPSSATVLVAGGFAGIASWVAATPLDMIKSRMQMDGLRRRVYQGMLDCMVSSIRQEGLGVFFRGVTINSARAFPVNAVTFLSYEYLLRWWG

SEQ ID NO: 201 - protein, 246 aa, Homo sapiens
MVKIYRHESLLGFFKGMSFPIASIAVVNSVLFGVYSNTLLVLTATSHQERRAQPPSYMHIFLAGCTGGFLQAYCLAPFDLIKVRLQNQTEPRAQPGSPPPRYQGPVHCAASIFREEGPRGLFRGAWALTLRDTPTVGIYFITYEGLCRQYTPEGQNPSSATVLVAGGFAGIASWVAATPLDMIKSRMQMDGLRRRVYQGMLDCMVSSIRQEGLGVFFRGVTINSARAFPVNAVTFLSYEYLLRWWG

SEQ ID NO: 202 - protein, 184 aa, Homo sapiens
MVKIYRHESAYCLAPFDLIKVRLQNQTEPRAQPGSPPPRYQGPVHCAASIFREEGPRGLFRGAWALTLRDTPTVGIYFITYEGLCRQYTPEGQNPSSATVLVAGGFAGIASWVAATPLDMIKSRMQMDGLRRRVYQGMLDCMVSSIRQEGLGVFFRGVTINSARAFPVNAVTFLSYEYLLRWWG

SEQ ID NO: 203 - protein, 194 aa, Homo sapiens
GASSQPKAPPGALMFHHQQAYCLAPFDLIKVRLQNQTEPRAQPGSPPPRYQGPVHCAASIFREEGPRGLFRGAWALTLRDTPTVGIYFITYEGLCRQYTPEGQNPSSATVLVAGGFAGIASWVAATPLDVIKSRMQMDGLRRRVYQGMLDCMVSSIRQEGLGVFFRGVTINSARAFPVNAVTFLSYEYLLRWWG

SEQ ID NO: 204 - protein, 118 aa, Homo sapiens
MPVEEFVAGWISGALGLVLGHPFDTVKVRLQTQTTYRGIVDCMVKIYRHESLLGFFKGMSFPIASIAVVNSVLFGVYSNTLLVLTATSHQERRAQPPSYMHIFLAGCTGGFLQAYCLA

SEQ ID NO: 205 - DNA, 39257 bp, Homo sapiens
  source 1..39257: mol_type = genomic DNA
gccatttctagggttggaccgtgcaggcacgggcggtcagctgggccgcagctcctccggctctgcagggtcacggaggaaggtaagtaaggtcagtaggtgatagaaaggctcatggctctcctggccggggcctggacagataatttatttagagagagggtacaggagtgcatggttttctcctagttcagtctggaactgggtttcctcggcaatgttttctttcctttcatcactcaatgaaaaagtacctggccaggcgtggtggctcacccctgaaatcccagccctttgggaggccgaggtggaaggactgcttgaggccagccggggcaaatagcaacactcccgtctttataaaaaatattgtaaaaatttaaaaagtacaaagaaaaagtacctgtattgtggatctgtgatgtatgggagtgcctttaatcttgggaaggaattataagacagacactccttacctggacttgattctgataaatacattccacaatattttcattttttaattttttatatatatattttttgaaacagaatctcgctctgtggcccaggctggagtgcagtggcatgatcttggctcactgcagcctctgcctccagggttcaagtgcttctcttgcctcagcctcccgagtagctgggattaacaggcacccaccaccacacccagctaatttttttttttttttttttgcatttttagtagagacggggttcgccatgttagccaggctggtctcaaactcctgggctcaagtgatccacccacctcggcctccgaaagtgctgggattacagacctgagccactgtgcccagcccgggatgttgttaaatatttctttttacttttgaaaaaaaatgaagttgaccatagaggtagaatgactttcaaggcacaggcacgtgggccaggaggctcccggggcctgtctgggagagagctaagcaagcagctgagctttggagagcagcggggagctgtgttcccctgcctggacaatgttaatgactgactttgactctggggcccagcgcatgagccctgagggactggcagcggcccccacctgcagcaataaccaacactgtgcttttgcagccagctcccctagtccaggccgagcttgcacttgcgtcttgtctgctgctgctgaaccaagatttagctgtgcgccctccttgcagtctcctggaaccagcaggaggaaacatgggggatactggcctgagaaagcggagagaggatgagaagtcgatccagagccaagagcctaagaccaccagtctccaaaaggaggtaaggcggtctctggtggggcaggccctttgcaggttaggcaagggcgtctgaacgaggggcgcaggcagtgaaatccgggccgatccctagtgacacggcagaagatgtactctttgatttgtgaagtacatctttaaagggataatctctggacttacttctctttccctctcgccagggaattctgcatcttcttttttttttttttttttttgagatggagtgttgctctgtcacccaggctagagtgcagtgctgccatctcggctcaatgcaaccttcacctccccggttcaagggattcttctgactcagcctcccgagtagctgggattacaagcacccgccaccatacccggctaatttttgtatttttagtagagacagggtttcaccatgttggccaggctggtctcagactcttggcctcaggtgatcctcccaaagtgctgggattacaggcgtgtgccactgcactcggctgcatattcttttttttttttttttttttttttgagacagagtcttgctctgtcacccaggctggagtgcagtggtatgatctcagctcactgcaacctccgcttcctgggttcaagcagctcctgagtagctgggactacaggcatgtgccactacgcctggctaatttttgtattttcagtagagacgaggtttcaccatattggccaggctggtctccaattcctggcctcaagtgatccgcccacctcggcctcccaaagtgttgggattacaggcatgagccaacttgcccggcccgcatattattttaagttcataaataggtgcttttgtgtgttgagcaagtgtctagacgggccagtatttttgttcaaactaatggcctttccaggaatggtcagaaagggcgttctttttaaaaatttttaaaaaaatttttttagagtcagggtcttactctgtcacccaggctggagtgcagtggtgcaatcatagctcactgcagcgtcaacctcctggactcaagcaatcctcctgcctcagcctcctgagtagctgggactacaggagcacaccaccatgctctgccaaatttttaacttttcaaaaaaattctttctgtagagtcagtatcttgctgtgttgcccaggctggtctggaactcccgggctcaagcgatcctcccacctcaggctcccaaagtgctgggattataggcgtgagtcgctgtgcccagccagagagggcgttctgatggttgagtcccctctaaatgcctgtcctccttatatctgaatggctgtagtgatgggaagtactgcccccagcatagcctgttctgtcttagaggcatctaccagggacagctgctctgagttgggctgcagtgagcagctggggctggccctgggcctgcagggaaagggagcttggggctggggggaaggcagaaaggagctcaacacagcacactgcgccagtcccaggcagttgggagcagcaggtgctgagcatggaggcgcagggagggcttcaggctcctaggatgaggaaaggcagctccaggtgagctcaggatggcttccgcttccagggcagaggtgtgggcagggcctccgagagctcccatgcctggcagcagaggggatggaggagggacggcaccaaggctttagggcttgaccggagggctggcaatggcctgaatggcttggcctgggacccccaggaggtagacgatgggctgcagcactttccctctctgccagtctcaggcctgatctcaggaagggcctcttagaaccctggtgggccccagtggccacagagcacagctgagaaatccccaagatgtgtcttctgagctggggacaggtgtggcggcacacgcctgtaaccttagcactttgggaggctgaggtgggaggatcccttgagcccaggagatcgaggctgcagtgagtcatgatcgcgccattgcactccaagcctgggtgacagagcgagaccctgactctaaaaaccaaaaatctgagctgggtctactcctcagtcaggcagcttcagggcgaatgcagacctcacccacatcagaacccaggcagtccctcagcaggagggaggattctggagccaaactgccagtcctgggcagggctgagatgaggaggagagctgagcccatccccgccctgtcctggaagtgcgccctggccctgaaagcagacgctgctccccagggatcccactggtgtgtgcagagtcctcagggtggcagcctgcagctgggagcccctcatcccctgcgatctgactccaagcccagcttcttcccagacaggtgaacatgggtgctggaaacttcaggctctggagatctggccggggctgcttctgaggacgagtgttatgagtagggcttgagttggacttttttttcctccttgattggtgtgtaatttacatacagtgtaatgtgcaggtttttttttttttttttgagacagtctcactgtcacccaggctggagtgattgtagtggctcactgcaacctctgcctcatgggttcaagagattctcctgcctcagcctcctaagtagctaggaacaggtgtgcaccaaaatgcctggctgatttttgtattttttagtagaaacggggtttctccatgctggccaggctggtctcccactcccaacctcaggtgatccgcctgcctcggcctcccaaagtgctgggattacaggcataaaccactgcacctggtcgaaatgtacagctctttagtgctgagtttggtgagttttgacagatgtaccaccccagaaagctccctcgtgcccctttctaggcagggccccagccctgaattcctgtggctgtggattagtttcacctgttcttgaacttcacaggcatggaaccatctggtgtctctttgagctgggttctgttctcagaaagctcccatcctagcaaatggcactgggccaggcacggcggcttacgcctgcaatcccagcactttgggaggctgagttgggaggattgtttgagcccaggagttcgaggctgcagtgagccatgatctcacctctgtgctccagcctgggtgacagagagagatctgactctaaataaataagtaaataaaaataagataaaagaaaatggcaccacagaaagttcagagtgcccaaatgtttctgtttctgggaggcctccgttgctcaccctgcatggagcctctggccaggactctaggctcagaggcgtatcccgagggcctttcttattggtgagctgttgccaagtcagccttttcattgagggcacaggatcacggttaggcacgtggaacctgagccaggtttccccctctctagctgtaaaccccggacagcctcctaatctttctgtgcctcagcgtcctcctctgtccatgggggtgacacagtgtggccagctcgcggggctgtcacgataattaatcacgttaacataagcaaagctccgggagcggtgccccggtgttgccagggcagccgctcagggtggaagcgcctgggacatgggctttggctggggccgccctggccgtaccgagggagggtggcacctggccttctgggctgggtccgggcgtggcactaacgccctcttccttcctccacacccagctgggcctcatcagtggcatctccatcatcgtgggcaccatcattggctctgggatcttcgtttcccccaagtctgtgctcagcaacacggaagctgtggggccctgcctcatcatatgggcggcttgcggggtcctcgcgacgctgggtaaagagacttgggagcctgttgcagccccggaagcatgcaggggcacgccaggcagctgctacctgtgccagccctcaccctgccagtatccctcttggcacatgtatggcaaacaggtgtaaatcaggctggactgaatgtccaacgctggagctcagggccgtccagcgagggcggaccacggtgggcccctccatacgagcgcagcctccggtgggaggaaggctccctggggccggggcagtgcctcacaaggggcctgtgggcccttcctctctgtgttccaggtgccctgtgctttgcggagcttggcacaatgatcaccaagtcagggggagagtatccctacctgatggaggcctacgggcccatccccgcctacctcttctcctgggccagcctgatcgtcattaagcccacgtccttcgccatcatctgcctcagcttctccgagtatgtgtgtgcgcccttctatgtgggctgcaagcctcctcaaatcgttgtgaaatgcctggccgccgccgccatctgtgagtacctgagcccagggcaggggtcagaaaagacctggcacagagggtgtctggggactccgccctcagctcctccccagtgagtctctggtgagagcccaggcagggcctggcatcagcctttgcagtacctgtgggtgctgcacactggggacccccaggcccgtgggggctgcagggaggggtgccgctggctgtcctgcagggcagagccttggctcagggcccagcttctcctggcgtggtggcaggtgcctgtaatcccagctactcgggaggctgcttaccacgccctgataatttttcgccatctgaggcagcccggctaaggtcatctccaggttcttttaaaaggtccttaaactcccatgtttggatctgccctcttggaatttgggagatgatatggtggctggtgggggagtaggggtgggccgcaggcagtggctcatgcttggaatctcaccactttgggaggctgaggtgggaggatcgcttgaggccaagagtttgagatcagcctggtcaacacagtgagaaccttgactctacaaacaatcaaaacattagccgggtatggtggcatgcacctggcgtcccagctacgtgggaggctgaggaggggggatcacttgagccttggaccctatctcaaaaaataaaagaggctaggtgcagtggcccacacctgtaatcctagcactttgggagaccaaggtggagggattacatgaggtcacgagttcgagaccagcctggccaacgtggcaaaaccctgtttctactaaaatacaaaaattagcagggcgggggaggggggtggtggggtagtgcatgcctgtaatcccagctactggggagactgaggcaggagaattccttgaacccgggaggtggaggttgcatttagctgagactgtgccattgcactccagcctggacgacagagtgagactccatctcaaataaataaatagataaaaataaaattacaaaaattggatatgagggcgatctggcagggacatctgtcaccccactgatcgccagggttgattcaggtgatctggctggctaggccagtgtcctcttcctccctcactgctccacgtgcatccctcccgaagctgcgcactcggtggaaaaggatgaccatccccgatagaggagggctggtcttcggtcaagggtatatgagtagctgcgctcccccgctagaacctccagacaagctctctactaaaaatacaaaaattagctgggcatagtggcgtgcacctgtcgtcctagctactcaggaggctgaggcaggagaattgcttgaaccggggaggcaaagattgctgagatcgtgagctgagatcatgccactgctctccagcctgggtgacagagtgagactccatctcaaaaaaaaaaaaaaataaaaaatatataaaagaaaggagactctctccagggctttgctgaaaaccataaatgcagaaactgtccccacccttccagtgttcatctcgacagtgaactcactgagcgtgcggctgggaagctacgtccagaacatcttcaccgcggccaagctggtgatcgtggccatcatcatcatcagcgggctggtgctcctggcccaaggtgacccacgggagggtgggccctgcacgggcacacaccaaacgcccttccactgggagcaggagcagccttgccccacgagcccatctccaaggaagcatggcaggaactcggtgggagggatccttagtttcagggcgtgtttattaagctggggtcacaatcatgcccatctttcccgtggagatacactcaagatctgcccggttgacacccgccgttcactgtctggcttcattacaggaaacacaaagaattttgataattctttcgagggcgcccagctgtctgtgggagccatcagcctggcgttttacaatggactctgggcctatgatggatggtgaggtgtcctgagatgtcccgagtctgggggtgggtggggttctccaggtgactttaactccacctgtcatggaaaacaatgagttctcctttctggggtttggtgtgactctgacattcaccctcacatttcctttttgtgaaggatgcgacaacctctcccctttattccctgagacacctgctcagtcagccagagtgctctgtgtagaaccctcactgggccaacacaggctcagccaaatcagaggcagccagggcccaagctcaggttttctgttttgttttgttttgtttttttaagacaggatctcacttggtcacccaggctggagtgcaatggcgtgatcatagctcactgcagccttgagctcctgggctcaagtcagcttcccgcctcagcctcctgagtagctgggactacagataggagctgccatgccctgataattttttatttttatgctttgtagagacagtctctctgtgttgcccaagctgctctcaaactcctacactcaagcaattctctctcctcggcctcccaaagtgctgggtttacaggcgtgagccactgcgcccagccccaagctcttgattaaacaaagaatactcaatagcacttctatttaaccttgaaaatcattaggtttgggagcctctctgaatctattatggtttgggggactgccctacaaaaataaataataccatataaattttatatatttatcgagtttagtggatgagattctgtttttgtccttttttttcttttttttttgagacggagtctcactctattacccaggctggagtgctgtggtgagatctcggctcactgcaattgcttgaatcccccaggttcaagcaattctcctgcctcagcctcccgactagctgggattacaggcacctgccaccatgcagggctaatttttgtatttttagtagagacgaggttttaccatgttggccaggctagtcttgaactcctgacttcaagtgatctgcccacctcggcttctcaaagtgctgggattacagacgtgcgccactatgcctggcccatttttgtcctttaaggaagaagcatggccatctgcaacgatggtccttctctcctgcaaagcatttatagatttaattcccttttcagacaaagaatattccattttttcaaagcaccctggggactcactactcctgattattcttgaaaatccgtgtgattcccgaggagggcaaaggctcaaccagctgacagatgtgtaggtctgggtagggccccaggccccaccactagcagggccattcacctggaaaaaaattcacctggaattcctgcaggagaatttttttctctggtagagaatcttaaatgaggccaacatttattattgtgggtttcattatcgaaaaagaaagtcaaggtgtgtgacgcttgttactttcctttttccaggaatcaactcaattacatcacagaagaacttagaaacccttacaggtaacagctgaatcagtgcagaggacagtagccgggcagcctgatttctcttctcctggtgaaggctggagctatttccctgggtattccatgatgcccttcccgacagtgaattatttctttttttttttttttgagacagagtcttgctctgttgcctaggctggagtgcagtggtgcaatctcagctcactcatttttgtatttttttagtagagatgagattttgccatgttggccaggctggtcttgaactcccaacctcaagagattcgcccatctcggcctcccaaagtgctgggattacaggtgtgagccactgcacccggccagcgaatggtttcttatgagctcactatgcacgcttagagtttggtttggtttgggacagagcagtggctcctaagggagggaagagcttggtcttcctttatctctggcttattttgctttataaacagttccatgtgaactgctctggagtctgagagaggcagcattctcatttgaaaatgtcttatgttcctgctgggcctctgctacctgcgaatcttctccctgggagggcctcagggagggcgtccatcttccgcgggaggctgtggtctgaacgtgggtctccgtgtcattgcccctcccagaaacctgcctttggccattatcatcgggatccccctggtgacggcgtgctacatcctcatgaacgtgtcctacttcaccgtgatgactgccaccgaactcctgcagtcccaggcggtggctgtggtgagtgcccgggcatcgctgctggcgggggctgtggcttgtgggaaggggtaaggcaggtgtcagcactggaggtgagctccctcccagggaaggagggcgatattcacggacggggacatggactgggcacgcacggcatggagctggaggcagggccgggctagccagggtgagggttcggcaggcaagcatgaagcagaggcagaaagtgccagggagtcgggggaggtcattatattaggtcattatatattaaaaaatatatatatttttggcaaaactggcaattacttttgcaccaccctaaataataatgaatcatagaaggtgagaggtgagaggcattggggtcagtgaagaggtggctgggggcctcctgcagttgcaaacagacaaccacgtgttggggatttggaaggtggaggagacgcagtttggataagtgttgaggtcactgaccacaagactgggggctgctgaggtgggagggagaattcagccattccggttggagtgggggttcagggaagtgagaggtgaaggtgtcaggatattgaaatgaccaagaattacgcagctgggtgtggtggcgagtgcctgtggtctcagctacttagaagactgaggcaaggatcacttgagcccaggagattgaggctacagtgagacgtgatcacgccactacactccagcctgggcgacagagcaagatcctgtctccaaaaaaaatcaaattaaaaaataaagatttggccaggcatggtggctcatgcctgtaatcccagcactttgggaggccgagatgggtggatcgcaaggtcaggagattgagaccagcctggccaacgtggtgaaatcccgtctctactaaaaatacaaaaattagctgaatgtggtggcatgcgcctgtaatcccagctacttgggaggctgaggcacgagcatcgcttgaccctgggaggcagaggttgcagtgagccgagacagcaacattgcactccagcctgggcaataagagcaaagctccatctcagaaataaataaataaataaataaataaataaataaagatttatgccagggagtagtagataagagacttctcttgccatcacaatatctggagataggcgagtggcgttctcctctctcctctgcagtggaggagtcagaggctgtgccccgaggcgaggtgggtccctgggtcccctgggaggccagaatagcttttgggggccggccgctcttggaggccaagaaagaccctcaggactcatctcgcttctctcaccagacatttggtgaccgtgttctctatcctgcttcttggatcgttccactttttgtggcattttcaaccatcggtgctgctaacgggacctgcttcacagcgggcaggtaggggacccccaccgtcactcccagggtggacaggggcggcgaaagcaatatcacccccgaggaagacacacagctaaaatcctcagggttctgccaggcgaaacccacgccagtacaagtaggagacccaaatccagagaagggatgtagcttgaacccacaccgcaaactggccaggaaggcatggatgggcctgcacacgggaattgatcaaggctgcctggaatctcagcctttccactccagggggccctagttcccaacatgggggggaagctgcccatgctgaggcgaagggaagcgacaccgcgtgaatgaggcactggttttccacgtggcactttttaccttttcacctagtgatatttttcacatagtgatatttcctgaacatcttccccatgttaatatatacaaactaatttgctaattagcaaattaataaataacccagaattggctaactttcccttaaagggccagatggtaaatattccaggctcgcaggctgcataaacctctgtcacagattctcaactctgccttggtacccaagagtgaacagccatggtcatgttccaataaaactttatttgcccaaacagctgtggtttgccaatcctttagacccatctggtctagagactgccaccagctgtgttgtatcacactttcagatgtagcataacttaacaaatccttcactcacacctgggtgtgggtggtttccatgaacgttgccgcagtgaacatcctcgaacacgtgtcttggcttagttgtccagtgttctgaatggatatatttcagagtgaaattgacaaagtctgtgtatgttaaaaaatgaaataccataaaatcattcttctaaagccaaaccgaaatacatgtagtgctaggcctccaacttcattctttgtcaaaagcgttttggctagatcctttgtatttctttataaattttaaatttaaattttaattaactaattaattttgaggcaaggtctcactctgtcgcccaggctggagcacactggcatgatcttggctcactgtagcctctacctcctgggctcaagcaatcctccctcctcagcctctggaatagctgggaccacaggcacgtgccatcacacccagctaacttttgtattcttagtcaagatggggtttcaccatgttgcccaggcccatttcgaactcctggctcaagtgatcctcctgcctccacttcccaaagccctggaattacaggcatgagctatcgtgcccagccttatattatttttgagatggagtcttgctctgtcacccaggctggagtgcagtggtgtgatctcgcctcactgcagtctccgcctccctagttcaagcaattttctgcctcagcctctggagtagctgggattacaggcacctgccatcatgcctggctaatttttgtatttttagtagagacggagtttcaccatcttggccaagctggtcttgaactcctgacctcgtgatccacctgcctcagcctcccaaagtgttgggattacaggtgtgagccaccacacccggccgccttattttaaattgacaaataataattgcttatatgggctgaggcaggaggattgcttgaggccaggagttcgagactagtctgggccacatggtgagactccgtctctacaaaaagaaatttaaaaattagctgggtgtagaggcccatgcctgtagttccagaagcccagaagttccaggctgcagtgggccacgatcacaccactgcactcctgcctgggtaacagagtaagaccctgcctctaaaaaataacaacaataattgcatatatgtatgtggtacagtgtgatgtttcaatacatgtaaacattgtggaatggcatatgtatcacctcacatacttctttatgctgagaacattaaaaattcactggctgggcatggtggctcacgcctgtaatcccagcactttgggaggccgaggcgggcagatcacgaggtcaggagatcgagaccatcttgcctaacatggtgaaaccctatctctactaaaattaccaaaaattagctgtgcgtggtggcgggcgcctgtagtcctagctacttgggaggctgaggaaggagaatggcgtgaacccaggaggcagagcttacagtgagccaagatcacgccactgcactccagcctgggcaacagagcaagactccgtctcagaaaaaaaaaaaaaaaccactagctattttgaaatatacactattactaacaatagtcaccttgctgtgcagtagatcaccagagcttattcctcccatcatactgaaactctgtagcctttgaccaacatttccccttttgccatcccaggcccctcttccttcagcctctggtaaccagcattctactctctattgctatgtttgaatttttagatttcatgtatgttgcagatgattacaactatctgggctggtggtacagggataagaagaatttaccaagacagctgtaggtcaggaaaggcagatttattacagaaagtaggaaaatacattgcaagggtgcaatgagcaggtcagcaagagaggaactgactgcaaagagacaaaggcttgctggggattttgtaggatggtgcttgtgctgtgtgctggacaggggtacgtgcagtactgataatgccaaggttgcagtgagctaacttgcatttttctatttttttttttgagacggagtcttgctctgtcacccaggctggagtgcagtggcatgatctcggctcactgcaagctccacctcccaggttcacgccattctcctgcctcagcctcctgagtagctgggactacaggtgcctgccatcacgcccggctaatttttttttgtatttttagtagagatggggtttcaccgtgtttgccaggatggtcttgatctcctgacctcgtgatccgcccgccttggcctcccaaagtgctgggattacaggcgtgagccaccgcgcccggctgcatttttctattagctgagggactggcgatcactgggcacaggaagcttgtaagttatttgtgcaggggggctatgtgtcctggaccatgaagaaaggcgggcttgtagcttatctgtcttatctcttttggctttcccttggtcccaccagcctgactcattttccctaattaggactccataatacataagggagatcatgggatatttgtctttctgtgtctggcttatttcacttagcataatgttctctagagtcatctctgttgtcaaaagatgacagaattccattctctttagagtcggaatagtattccattgtgtatctattacattatttttattcattcatctgtgatggacacttaggttgtgtccatgtcttggctgtggtgaataacgttgtaatgaacatgggagtgcagacacctgacatgtggatttcaattcattcaaatatatacccagaggtacataggagtgcaggtatctggcatatgatttcaattcattcaaatatatacccaaggccaggtgcagtggctcacgcctgtaatcccagcactttgggaggccgaggtgggtggatcacatgaggtcaggagttcgagaccaaactggccaacatggtgaaaccctgtctctactaaaaatacaaaaattagtggggcatggtggcagatgcctgtaattccagctactcaggaggctgaggcaggagaattgcttgacccgggaagcagaggttgcagtgagccgagatcgcaccagtgcactccagcctgggcgacacagtgagatactccgtctcaaaaacaacaacaacaaaaaatcattgcccagaccaatgttacagagcttgcctgttttctcctaggaattttacagtttcaagtcttatatccattttgagtagatttcttgtctaaggggtgagataagggtccaatttcattctggcagctttcccacttgcatatgaatattacaatcagcttgccagtttctatagtaaagctgttgggattttgatcaggactgggttgaatccatagatcaactgggggaagactctgctgtcttaaaagtactgagtcttccagcatgggtacggtggctcacacctgtaatcaaagcactttgggaggccgagggggaggactgcttgagcccatgggttagagaccagcctaggcaacatagtgagaccccatgtctacaaaaagtacaatagacttagccaggcatggtggcacatgcctgtggtcccagctactcaggagactgaggtgggaggatcgtgtgagcccaggaggtcgaggctgcagtgagctgagattgcaccactgcactgcactccagcctgggagacagagtgagaccttgtctccaaaaaaaaaaaaaatactgagtcttccaatccatgggtggactatttaggtctttaatcttgttttaacaacttttttgtttgttggtgtttttttttttttttttttgagacaggatcttgctttgtcacccaggctggaatgcagtgacacgatcctggctcactgcaacatctgcctcccaggttcaagcgattctcatgcctcagcctcccaagtagctgggattacaggcatataccatcacacctggctaatttttgtatttttagtagagacagggtttcaccatgttgcccaggttggtcttaaactcctggcctcaagtgatccacctgcctcagcctcccaaagtgttgggattacaggcgtgagccactgggcctggcttaattttctgtaaaaaaaagttttttgagtagtttttggtatatagttcttgcacatcttttgtcaaatttattccaaagaatttcatttttcatactattgtaaatggtactgttaaaaaaaagttgcttaatttttagtttctgatagtttattgctagtatacacaaacacaattttaacagttctaattaaggtacaaatataaaactcaccctttgtaattatacaactcaattattttcataaatttataaggctgtacaaacatcacaatccaattctagatcatttccatcaccccaaaaagtttcctcattgcctaattaatccctgctttcacccgcagctccaggcaaccactaatctacttctgtctctataactgctttttcttgacatttcatctaaatggaatgacatgggccaggcgtggtggctcacgcctgtaatcccagcactttggaaggccgaagtgggtggatcacttaaagtcaggagttcaagaccagcctggccaacatggtgaaaccctgtctctactaaaagtacaaaaattagccggacgtggtgggcgcctataatcccagctactcaggaggctgaggcaggagaatggcttgaacctgggggacggaggttgcagtgagccgagattgcaccattgcactccagcctgggtgacagagcgagactccgtctctcaaaaaaaaaaaaaaaaaaaaaaaagtttatagctttggtcttgtaaaatctggcaggactaacgctcccacgtcagacttctccttgtctgtttagcattccctatacacttagaattattttgtccggttccaaaagtactgcttgcattctgattttatggaatttctatattaatttctggaggactgataaaaagatttgacagtattcaccttgtgtctaaatctcccttccattaatcaactcccatcctcctggtttcacttcttttgggaattaatatcaagttcatatcaattcaaagttaagatatgtagttgtaaatagatgggtctttgtggcatttgtattgacttctaattttactgcactgtaattagagtatgtgacctttatgatatcaagtcttgatttagggtttttgttcgtcgttttgagacagggtctcgctgtcgcccaggctggagtgtggtggtgcaatcatggctcactgcagcctcagacccctccctgtgcttaagtgatcctcccacctcagcctctcaagtagctgggaccacaggcacgtgccaccatgcatggctaatattaagttttttgtagatgtgaggtcttactatgttgcccaagctggtctcaaactcccggcctcaagcaatccacccacttcaacctcccaaagtgctgggattacaggtgtaaggcacagtggctggcctgatatcaattcttctttttttttaattttattattattacactttaagttttagggtacatgtgcacaatgtgcaggtttgttacatatgtatacatgtgccatgttggtgtgctgcacccattaactcgtcattttaacgttaggtatatctcctaatgctatccctccccgctccccccaccccacaacagtccccggagtgtgatgttccccttcctgtgtccatgtgttctcattgttcaattcccacctatgagtgagaacatgcggtgtttggttttttgtccttgcaatagtttgctgagaatgatggtttccagtttcatccatgtccctacaaaggacatgaactcatcattttttatggctacatagtattccatggtgtatatgtgccacattttcttaatccagtctattgttgttggacatttgggttggttccaagtctttgctattgtgaatagtgccacaataaacatacgtgtgcatgtgcctttatagcagcatgatttataatcctttgggtatatacccagtaatgcgatggctgggtcaaatggtatttctagttctagattcctaaggaatcgccacactgacttccacaatggttgaactagtttacagtcccaccaacagtgtaaaagtgttcctatttctccacatcctctccagcacctgttgtttcctgactttttaatgatcgccattctaactggtgtgagatggtatctcattgtggttttgatttgcatttctctgatggccagtgatgatgagcattttttcatgtgtcttttggctgcataaatgtcttcttttgagaagtgtctgtttatatcctttgcccactttttgatggggttgtttttttcttgtaaatttgtttgagttcattgtagattctggatattagccctttgtcagatgagtaggttgcgaaaattttctcccattttgtaggttgcctgttcactctgatggtagttgcttttgctgtgcagaagctctttagtttaattagatcccatttgtcaattttggcttttgttgccattgcttttggtgttttagacattaagtccttgcccatgcctatgtcctgaatgttattgcctaggttttcttctagggtttttatggttttaggtctaacatgtaagtctttaatccatcttgaattaatttttgtataaggtgtaaggaagggatccagtttcagctttctacatatggctagccagttttcccaggaccatttattaaatagggaatcctttccccattgcttgtttttgtcaggtttgtcaaagatcagatggttgtagatatgcagcattatttctgagggctctgttctgttccattgatgtatctctctgttttggtaccagtaccatgctgttttggttactgtagccttgtagtatagtttgaagtcaggtagagtgatgcctccagctttgttcttttggcttaggattgacttggcaatgcaggctcttttttggtttcatatgaactttagttttttccaattctgtgaagaaagtcattggtagcttgatggggatggcactgaatctataaattaccttgggcagtatggccattttcacaatattgattcttcctacccatgagcatggaatgttcttccatttgtttgtatcctctttaatttcattgagcagtggtttgtagttctccttgaagaggtccttcacatcccttgtaagttggattcctaggtattttattctctttgaagcaattgtgaatgggagttcactcatgatttggctctctgtctgttattggtgtataagaatgcttgtgatttttgtacattgattttgtatcctgagactttgctgaagttgcttatcagcttaaggagattttgggctgagacaatggggttatctagatatacaatcatgtcatctgcaaacagggacaatttgacttcctcttttcctaattgaatatcttttatttccttctcctgcctaattgccctggccagaacttccaacactatgttgaataggaatggtgagagagggcacccctgtcttgtgccagttttcaaagggaatgcttccagtttttgcccattcagtatgatattggctgtgggtgtgtcatagatagctcttattattttgagatacgtcccatcaatacctaatttattgagagtttttagcatgaagggttgttgaattttgtcaaaggccttttctgcatctattgagataatcacgtggtttttgtctttggttctgtttatatgctggattacatttattgatttgcgaatgttgaaccagccttgcatcccagggatgaagcccacttgatcatggtggataagctttttgatgtgctgctggattcggtttgccagtattttattgaggatttttgcatcaatgttcatcaaggatattggtctaaaattctcttttttggttgtgtctctgccaggctttggtatcaggatgatgctggcctcataaaatgagttagggaggattccctctttttctattgattggaatagtttcagaaggaatggtaccagctcctccttgtacctctggtagaattcggctgtgaatccatctggtcctggactttttttggttggtaagctattgattattgccacaatttcagagcctgttattggtctattcagagattcaacttcttcctggtttagtcttgggagggtgtatgtgtccaggaatttatccatttcttctagattttctagtttatttgcatagaggtgtttgtagtattctctgatggtagtttgtatttctgtgggatcggtggtgatatcccctttatcattttttattgtgtctatttgattcttatctcttttcttctttgtcttgctagcagtctatcaattttgttgatcctttcaaaaaaccagctcctggattcattaattttttgaagggttttttgtgtctctatttccttcagttctgctctggttttagttatttcttgccttctgctagcttttgaatgtgtttgctcttgcttttctagttcttttaattgtgatgttaggttgtcaattttggatctttcctgctttctcttgtgggcatttagtgctataaatttccctctacacactgctttgaatgtgtcccagagattctggtatgttgtgtctttgttctcgttggtttcaaagaacatctttatttctgccttcatttagttatgtacccagtagtcattcaggagcaggttgttcagtttccatgtagttgagctgttttgagtgagattcttaatcctgagttctagtttgattgcactgtggtctgagagacagtttgttataatttctgtccttttacatttgctgaggagtgctttacttccaactatgtggtcaattttggaataggtgtggtgtggtgctgaaaaaaatgtatgttctgttgatttggggtggagagttctgtagatgtctattaggtccacttggtgcagagctgagttcaattcctgggtattcttgttaactttctgtcttgttgatctgtctaatgttgacagtggggtgttaaagtctcccattattattgtgtgggagtctaagtctctttgtaggtcactaaggacttgctttatgaatctgggtgctcctgttattgggtgcatatatatttaggataattagcttttcttgttgaattgatccctttaccattatgtaatggccttgtctcttttgatctttgttggtttaaagtctgttttatcagagactaggattgcaacccctgcctttttttgttttccatttgcttggtagatcttcctccatccctttattttgagcctatgagtgtctctgcatgtgagataggtttcctgaatacagcacactgatgggtcttgactctttatccaatttgccagtctgtgtcttttaattgcagcatttagcccatttacatttaaagttaatattgttatgtgtgaatttggtcctgtcattatgatgttagctggttattttgctcgttagttgatgcagtttcttcctagccttgatggtctttacattttggcatgtttttgcagtggctggtaccggttgttcctttccatgtttagtgcttccttcaggagctcttttagggcaggcctggtggtgacaaaatctctcagcatttgcttgtctgtaaagtattttatttctccttcacttatgaagcttagcttgggtgggtacgaaattctgggttgaaaattcttttctttaagaatgctgaatgttggcccccactctcttctggcttgtagagtttctgccaagagatccgctgttagtctgaccggcttccctttgtgggtaacccagcctttctctctggctgcccttagcattttttccttcatttcaactttggtgaatctgacaattatgtgtcttggagttgcccttctcgaggagtatctttgtggcattctctgtatttcctgaatctgaatattggcctgccttgctagattggggaagttctcctggataataccctgcagagtgttttccaacttggttccattctccccgttactttcaggtacaccaatcagacgtagatttggtcttttcacatagtcccatatttcttggaggctttgttcatttctttttattcttttttctctaaacttcccttctcgcttcatttcattcatttcatcttccattactgataccgtttcttccagttgatcgcatcggctcctgaggcttctgcattcttcacgtagttctcgagccttggctttcagctccatcagctcctttaaggacttctctgcattggttattgtagttatccatttgtctaattttttttcaaagtttctaacttctttgccattggtttgaatttcctcctgtagctcggagtagttggaccgtctgaagccttcttctctcaactcgtcaaagtcattctctgtccagctttgttccattgctggtgagggagctgcattcctttggaagaggagaggcactctgctttttagagtttccagtttttctgctctgttttttccccatctttgtggtttatctacttttggtctttgatgatggtgatgtacagatgggtttttggtgtggatgtcctttctgtttgttagttttccttctaacagacaggaccctcagctgcaggtctgctggagttttctagaggtctactccagaccctttttgcctgggtgtcagcagcagtggctgcagaacagcagtggctgtagaacagcggattttggtgacctgcaaatgctgctgcctgattgttcctctggaatttttgtctcagaggagtacccggccatgtgaggtgtcagtctgcccctactggggggttgcctcccagttaggctgctggggggtcagggacccatttgaggaggcagtctgcccattctcagatctccagctgtgtgctgggagaaccacaactctcttcaaagctgtcagatagggacatttaagtctgcagaggttactgctgtctttttgtctgtctgtgccctgcccccagaggtggagcctacagaggcaggcaggcctccttgagctgtggtgggctccacccagttcgagcttcctggctgctttgtttacctaatcaagcctgggcaatggcaggcgcccctcccccagcctcgctgccgccttgcagtttgatctcagactgctgtgctagccatcagtgagactctgtgggcgtaggaccctccgagccaggtgcgggatataatctcctggtgcaccgttttttaagcccgttggaaaagcgcagtattagggtgggagtgacccaattttccaggtgccgtctgtcacccctttctttgactaggaaagggaactccctgaccccttgtgcttcccgagtgaggcaatgccttgccctgcttcggctcatgcacggtgtgctgcacccactgtcctgcgcccactgtctggcactccctagtgagatgaacctggtacctcagatggaaatgcagaaatcacccgtcttctgcgttgctcacgctgggagctgtagaccggagctgttcctattcggctatcttggctccatgcccccatcaattcttatttatttatctttttgagacagagtctcactctgtcatccaggctagagtacagtggtgcaatctcggctcactgcaacttctgcctcctaggttcaagtgattctcctgcctcagcctcccaagtagatgggattataggcacctgccatcacacctaatttttgtgtttttaggagagagggggtttcactatgttggccaggctggtctcgaactcctgacctcaagtgatccacccgcctcggcctcccgaagtcctgggattacaggcatgaaccactgtgcctggcctcaattctttagaagtttgaaaatgaccttcgtggctcactgatatttttatgtttcctgtggtcttgaagataatgtgtattccataattatatctagatttttatatgatcatcaagattataacttgtaatgttcaaatcttgtgctcaaattggatttgccaatttttgtctgctatgtttcaagggctcctgggtttttttgtttgtttggttttgtttgagacagagtcttgttctgtcgctcaggctggagtctggagtgcaatggtgagatctcggctcactgcaacctccgcttcccaggttcaagtgattctcctgcctcagcctcagcctcagctgaggttacaggtgcccgccaccacacctggctaatttttgtatttttagtaaagacggggtttccccatgttggttaggctggtcttgaactcctgaactcaagcagtccacctgtctcggcctcccaaagtgctgggagtataggcgacagccaccatgcccagctcaggctcctgttttttatatcttctcctcttatttatttttatttttttgagatagaatctcactctgtcacccaggctggagtacagtggcacaatcttggcttactgcaacctctgcctcccgggttcaagcgattctcctgcctcagcctcctaagcagctcagagtacaggcgcccaccaccatgcccagctgattttttgtatttttagtagagatggggtttcaccatgttggccagactggtcttgaacttctaatctcatgatccgcctgcctcgggctcccaaattgctgggattacaggtgtaagccatcacatctggcttttttttttttttttttttttttttgagatggattctcactctgtcgtccaggctggagtctggagtgcaatggtgcgatcttagctgcaatggtgcgatctcagctcaccgcaacctctgcctcccaggttccagcgattctcctgcctcagccccctgagtagctgggactacaggtgtgcaccaccatgcccagctaatttttcatatttttagtagacatagggtttcaccacgttggccagactggtctcgaactcctgacttcaggcgatccacctgcctcagtctcccagtgctgggattacaggtgtgagccactgtgcctggccgaaatttttaattatggtaactttttcaagaaattctggttagccagaggataccagaggctgaaaagcatggggggaaagggagatagagagagacttgctaaaggatacaaaattacagctagacaggaggaacaggttctagtgttctacacacagcagggtggctagagctcacattaatattaatatgtagcttcagatagctaggggaggatattgaatgttcccaacacaaataaatggtacatttaaaaaatttttaaagttatttgtagagatgggatctcactatgttgccaggctggtctccaactcctgggctcaagtgatcctctgccttggcctcccaaggtgttgggattacaggcgtgagccaccacacctagtctctcagtgcgtttaacctcctcactcactctgccaaaacccactcgtctcccgaagacagacccccatctgaagctcaggtccctgctcagctcccttcctgagcctcccgagggctccttggtggaccccggagcacaagtcctcagtggccctggacagatggtctgcactctggtcagcggactcccgtgtcgttattttccagactcatttacgtggcgggccgggagggtcacatgctcaaagtgctttcttacatcagcgtcaggcgcctcactccagcccccgccatcatcttttatgtgagtacaaatcccgctaccagcctatcttcaaggcggggacactccatccatggggtgctaagcccggcggcttccaaatgacccagatgcccttattccttgctatgaaacagatatagaaagagtcccaggacaagtgaaacaacatacccaatatctgctcctttgtctgaatttatccacgaaagacagtgtatgccctcaatgcttctgtgtgcatttgtctgtgctgggtccctggtaacaaactctatataaaagcccactagcttacagggaaggagagcaagacattttcccaggtagttactgacagctgcctctcattatgctctaatgattaagaagtcaccggatccttgtgcagtaaacgccctttgactttttttttgatacggagtcttgctctgtcacccaggctggatggagtgcagtgccatgatcttggctcactgcatcctccgcctcccaggttcaaatgattctcctgcctcagccttccgagtagctgggattgaaggggcctgccatcacgcctggctactttttgtatttttagtagagatggggtttcaccatgctggccaggctggtcttgaactcctggcctcaagtgatttgcccaccccagcctcccaaactgctggattacaagcatgagccaccgtgcctggccacccctttgacatctgcccatgggagcttctccatggtgcatggttcttgttttgtgcaactgttctgggcactgataaaccatccacatttctagccccaggggtggtctacactccttcccccagaggagaaccactactctctatcattctgaagacaggaaaacacacccaggaaataccagtccagggccacacaactaacacaggccaagactagacctgagcttctaatccagggccccagcccacattgaaaactctctgtgtggaaaattcttaattatgaagctggtataatattcatacatattaggttggtgcaaaagtaattgcggttttttaccattaaaaccgtgagatggcgaaaccccatctcactaaaaatacaaaaattagccgggtgtggtggtgcctgcctataatctcagctactcaggaggccgaggcaggagaatcgcttgaacttgggaggcggaggttgcagtcaaccgagatcacgccactgcattcgagcctgggtgacagagtgagactccatctcaaacaaaacaaaacaaaacaaaacaaaacaaaaaaacccacagttacttttgcaccaacctaatattttatttttcccttgcttaaaatcacaacctcaaagattcagaaatttcccaggtcttttctgcaagcttcatagagaagagctatcatagccaaagtcaggtttaaccccaactatgaaggaatgcctagaagttcgtttcatgctaaagtgtttattcacaagaaaaactgcttcttcggtcttctgtgacatgagaacagtgttttgtagtaatgacctacaaatccattcttctttctattagggtatcatagcaacgatttatatcatccctggtgacataaactcgttagtcaattatttcagctttgccgcatggctgttttatggcctgacgattctaggactcatcgtgatgagatttacaaggaaagagctggaaaggcctatcaaggtaagcttgcagccccagagtcacgagtggctttggattttttaatgaattagatgtaactctttcaaatgctaggggcatgccttctagttccaatctgacttgactcttttaaaatatcgtattttagagtggagtttactcttcacagcatagtttatgatccagttagccaccttgttattcattttattaagtcatcacgaatacctgtggcccgtctctgtaaccaaagaggtccacctggctctcatttgttttgaggcagagtctcactttgtcgcctgggctggagtgcagtggcgcatccttggctcactgcagcctctgcctccccggttcaggcaactctcctgcttcagcttcccaagttgctgggattacagacatctgccatcacgcctggctaatttttgtatttttagtagagatggggttttaccatgttggccgggctggtctctaactcctgacctcaagtgatctgcctgccttggcttcccaaagtgctgggattacaggtgtcagctactgcacccagcccagttctgatatctctcgcacatatatttttcatagatttttcttgtttcatttttttttctttggagacagggtctcactgtgttgcctaggctggtcacaaactcctgggctcaagcgatcctcccaccttggcttcccaaagtcctgggattacaggtgtgagccactatgccggcctcctttcatagactgatgggaacttctgaactccagccgcagactcattgctgtgcatgcaaccactcagagtctattcttgccatctgtttcgggctccctctcactccctgcatggctggtgtggatctatataccaataaggatgaagtagaattttattgttgttatgttaaggggctttaaaaaaaacctgctatttaattcttatgataacagacataagaaaaaggtaagctgagggcttaagtaactaggacgagaataaggacaatgtctttagctttaggactttgttttcagagatacatccagtggtctttctggccctgtgtcttgactatggacaagtctctggcatcagctgagtcatggcacagcctgcctggagtctggcagatccaccttggttaagtcattgcaggcaaaattatgacggtagcatagacttgtaatctgcacaaaatccctcatagaaacagacagagcctctaggataccaaaggaaaacacttcagccaacattgtcaacacaaatcaaggaaatgaagtcttaccaccaactccagactctaagtggatgccccactggactccagcaccatgtgttcccaggagagagggcgcacgtggaacgaggttctcagtgggaagatcagaggacccccaggggaggtggaggagcagggctgcagtggcttaagcccttgaggatcccagaaactccccacaaaaactcctttccagaaggataaggatcactgacgacaacagcaagagaaacaactgctgggagagaaaggacatggaacttggcaagaatatcagggtcaaggagctggagcctgtggatacaaatctctcaactgggaaggggctccacagagaggccatgtcccattagcacttcaaaacatcattttagggaaaaaaatcatttcagaaataaagagtgggcaagaaggaaaagaaggaacacagaggctgagtgtggtggctcacacctgtaatcccagtactttgggaggccaagggaggaagatcacttgatcccaggagttcaagaccagcttgggcaacagcaagaccctgtctctacaaaaagatagctgggtgtggtggtgcacgcctatagtcccagctatttgggaggctgaggtgggaggaatgcttgagcccaggaggtcaaggctgcagtgagccaagatcgtgccactgcactccagcctgggcaacagagagggaccccgttgcaaagaaaaaaagaaaagaaagaacataagagcaaagaaacatgctaggaaacagaaggccaaaaggaagaaaacaaatatcagacagaagtagaaagggtttgagagaaaacaaggggacagaaaaaaactaggggtggggaaggtggggaatctaatacatgcataattggagtccctgaagaagaaaatgcaagtaacagaatcccaaaatccataattcaagaaacatttcctggggtgggaggaaaaatggagggtgatcttgaaccaacatactgaaaggcatacaatgtaactggaaattttgagctaaaattggcagcaaaaatatatgctgataaaattacagagctttaaaaaaatgctttgggcatcccctccccttttcctgttcccactcccatctgcaattcacttataaaggaaaggaaataattctggcctcaaacttttcaccaccaacacttcatgctgcaagagagtggagcaacatatttaaactactcaaaggaggaaaatgtaagccagattcttatacccagccaaactgaccttgcagaataaagtctacagtcactagtatgaaagaactcaaggcaaatatccttacacgagactttttttttttttttttttgagacggagtgtcactctgtcatccaggctggaatgcagtggcgccatctcagctcactgtaacctccgcctcctgggttcaagcaattctcctgtgtcagccttctaagtagctgggattataggcgcgtgccaccacgcctggctaatttttatatttttagtagagacagggtttcaccatgttggtcaggctggtctcgaactcctgactttgtgatccacccacttcagccttccaaagtgctgggattacaggtgtgagccaccgtgccccgccaattacatgagaccttgaggaatcacccagagaatgagcttcagaaaccaaaaagtcactggcaaaggtgaatatatcaaattatagaactaagattaatgatgagagataaaggggacagaagtgtatgccactattatgcactggcaatatcatacaaaaacatggacgagagaaagcacatggaaaagtatatgccaactgaggaaagtatgccagacaagctgccaataaggaagccactttaaattagatgctgggaggaagagaacacctagctaacttcattattgcttattatacacaatgtctaaaaaaagaagaaactaagggtattatatgctcagttaataatataattcatatctttaaaaggggactaagggcattatacataatatatacatatatgtgtactatatatgtgtataatgtataatatatgtaatatatgtgtataatagatatatatgtatatatttgtatatgtatatatgtgcatatatgtatatatgtatatgtgtatcattacatgtctgttatacatacaaatacatatacatataagtacatatatacatatataatatctttaaaaggggactaagggtattatataaggatataagatataaatatgttgtatataagtatatattataggtatatgtataatatacgtttttatatacacatgatatgtatatatacataatatataacatatatacaacaaatatatatagcattaaatatatgtatattatgcctattatatatgtatagattgtgcctattagatataatatattcttatataatatacacatatattatacagaatatatccttatataataatgcccttagtcccctttaaaatatattagttataatatattagctataatagttacagtaactctcagaacaaaaacacatccttcatacctaccaaaagacacattaaaaaagaggaagtgtgcttagaatacatgaaataattaaaatttaacatttaaacaaaggagggaaacaaaacagaccatactgtaaaggaccctacctataaagccttgtttatattaagcggccttttattttacttcctgtttgtccactacaagtttggatgggctcagaaaatctcaagtaagtaccaacagaagggccgcttggcttctgtgaggtgcaggcaggcacggcgtcctcacctgtcctgactccaagacctctgtcacagtgtctcaccctgctggcagatctccctcagaataccttcctggttgatgttttcttgtagactgcttattaggattttttgtcattgctattttttgcttattagcttttaacaccctgaactatagaatccatgcatctctaaatgctttcatttccagctgatatttatatggaaaaatcagtatctgaatccccaaaatgtagtataaacttttgacaaaatgtgtgataaaagtttcaagttacattccaaattcaacacacatcaaaatcacgtgtaggcgtactgaaagccacgtgtaggcgtactgacagtgtgaggtgtaagcgtctcacgtcttgcgagaccatgttattgcattaaaggcagtcattggtcaacaaccatgttaactgtttggtcaccaaaaattattttaaacacagtttaccatctaatgtaatctgtgttgggtaacatgttatttatatgcacatttactgttttttggttgggaatttgaggtttcttttttttttttttttttttttttttgagatggaatctcctctgtcacccaggctggagtgcagtggtgtgattacaactcactgcaaccgtgcctcccaggctcaagcgatcctcccacctcagcctcccaaatagctgggaccacaggtgcacgccaccacacctggctaatttttgtattttttgtagacatggggtttcgccatgtgggccagactggtcttgaactcctggctcaagttatcttcctgccttggcctcccaaagtactgggattacaggtgtgagccacagcacctggcaggaaatttgaggtttcctatggtgaatttaaaagaagggacacaggcctggggggttcttccatagaacatcactcttcgaggacgcaagactgacagtgagtagaggatgcttgtatacagaaagataaaacaacacgagagaatggagaccagacttatcattatatgaataaacgggcttactccatttaaattggacttacatcagccattgaaagtaaaagatttttcaggcggatcttcaaagctgtgaaaaattaaaagaacaggcagagaaatatcaagcaaatgaatatacagaaaaacaggggctgtgatcttatcagacaagtgctcaggcccaaagcattatttaagacaaagacaggccatgctaaaggctaaaatccacaatgaagaggtaagttttgaaaacctattcaccaaaccatatagcaaccatctttacgaagcagaaactgcaggaaatccacggagggagaaacacgttaataacaggtgactggaaaacacctccttcaggccaagacagatctggacgcagcactggtaaaagtgactggggatctaaaatatagcaagatagatcttagaggtttgtatcaagccccgaaccccagcaacagcgagtatacctttttcagttgcaaatgggacctgtctgaaaactgacagcttttaatgccatgaagaaaaccttgatatttcaaaaagaaaaccccagaaatcaaaacaaccaaaaagcaaataacattctctctctttaatgaaacaaaacaggaaattgataaaagaaaaaagttaaacttttgggtccaagaggaaatattaatagaaatagaagataaaagtacataaattctggccgggcgcagtggctcacgcctgtaatcccagcattttgggaggccaaggcggttgcatcacttgaggtcaggagttcaagaccagcctggcaaacatggtgaaaccccatctctactaaaaatacaaaaattaggccgggtgtggtggctcacacctgtaatcccagcatgttgggaggctgaggccggcggatcacaaggtcaggagatcgagaccatcctagccaacatggtgaaaccctgtctctactaaaaatacaaaaaattagccgggcgtggtggcgggcacctgtagttccagctactcgggaggctgaggctgagaatcacttgaacctgggaggcagaggttgcagtgagccgagattgtgccactgcactccagcctgggtgacaaagtgagactcggacacacacacacacacacacacacatacacacacacacacacacacagtacataaattcctagaaatagcagtaatgatgacaggacatataatctatgaacacagcttaaatagtgctttgaggaagctccattacattaaatatatcaataaaaatgaaaacaaattaaatagacaactccaaaagcaagataaagaacaacagaaaaccaaaagaaaacagaaggaactaataagcagaaaaaaacttaaggtgttagaaaaaacagaaatgaatgaatgagtgaataataatcagtctttttgaaagttttcctcctttttcaatgctctggaataaattaagcaatactggaattgtctgatttttagaatttccctgtgattctaatgcaactaagatcagttttagtaaattacattttcctagaaaattgttcatttcttccatgtattcaaatttatctgtatagagttgtacaaaatagtcttatgatttgtattaatctttagaacataacttatgttgtaaagattaattgcccatttttattttttatttgtgtttgtgctttctcctttttaaggttagctattgattttattgatttttcaaattatttttagactgtaacattgacaccaaaccttacaaaggtaacttcacacaaaaaagggaaatgtactcaccaatctcacttaggaataacgatataaaaaatctaaaataaaatgttaacaaacagaacccagttacactaaaaagataatatatcatgactaggtccagcctatgcaaaggtagctgaagaccgaaaatccattaattaaaagtttaattcaggggctgggtgtgattggctcatgcctgtaatcccagcgctctgggaggccaagatgggcagatcatttgaggtcaggagttcgagaccagcctggccaacgtggtgaaaccctgtctctactaaaaataaaaaattagctgggcatgttggcacacgcctgtaatcccagctacttgggaggctgaggcaggagaactgtttgaacccaagaggcagaggttgcagtgagccaagatcacgccactgcactccagcctgagcgacagagcgagactctgtcttgggaaacaaaacaaacaaaaaaacacagtcaaaggaaaaatgcaatgacacttaaaaatgaaaacaaaacaatcccagcaaacttaactttgttcctaataagagaataccaaaattaatctctgtccttgaaaaaggataatgagtactccaatcacccaggttatggtctttatttatttttagagtctcactctgtctcctgggctggagtgcagtggcacattctttgctcactgcagcctccgcctcccgggttcaagcgactctcctgcttcagcttcccaagttgctgggattacaggcatctgccatcacgcccggctaatttttgtatttttagtagagacggggtttcaccatgttggccaggctgatcttgaactcctagactcaagtgatctgcctgcctcagcctcccaaagtgctgggattacaggagcgaaccactgcagccagcctccaggttatggtctttaaatgccatttcctgctaaaaggaaacaaagctctctggagaaatggatgaaaacccacgtctggctctggagagataaatgaaaacccaggtatggcacttcttgtcacccagaaaacaaagaggcttttgaagagcactggcgtcccattcccagggcccaggacagtgtgaggggttcctgccgccccgcacaggaccttctgaacaacgtgaacaatgactacaacgggttgaaactcaccatgtatagaaaaacccacaggctggagttgcctttggaggtctcaggggcccaacttgtcattctggaaacacacagaatacagcactaatcctgcctttcctgtatgaactgcaattcagaataaccagaaagttgaagtacttcatatagcatttcagataattgaggaagaaattacaaattagaaaaatcaccattttgcaaaccctgatgaaacaatgaaggcaacgatcatcagtggatgctaaaacattaaacagtttatctatttttttttttcttttttgagatggagtttccctcccgtggcccaggctagagtgcaatggtgcaatctcggctcactgcaacctctgcctcctgggttcaagcgactctcctgcctcagctcctgaggagctgggattacaggcacctgccaccacgcccagctaacttttgtgtttttggtagagatggtgtttcactatgttggccaggctggtcttgagctcctgacctcaagggacccaccggcctcggcctccctaagtgctgggattacaggtgtgagcacccatgcccggccaaaaaactttttaaaaagtaaagaaaatttttaaaaggtatagatgaaataagattggcaaaattacattaaaatgattgaaattggaggagggggtacatggagttcatactctttttataaaaatcggttttttatcatgaaaaatttcaaaaagaaaatgggtacccatgacctgtttttcgtctccaggtgcccgtagtcattcccgtcttgatgacactcatctctgtgtttttggttctggctccaatcatcagcaagcccacctgggagtacctctactgtgtgctgtttatattaagcggccttttattttacttcctgtttgtccactacaagtttggatgggctcagaaaatctcaagtaagtaccaacagaagggccgcttggcctctgtgaggtgcaggcaggcacggcgtcctcacctgtcctgactccaagacctctgtcacagtgtctcaccctgctggcagatctccctcgtcccaggaggacacatgcccacgccctcactgtacacctctgggtccacccttgattgttttgttcctgtcaattactgtaataagtaggaagggaaagcaccattttcttttctttttggagacacagtcttgctctgttgcccaggctaaagtgcagtggcatggtcatagctcactgcagtcttgaactcccgggctcaagccatcctcccacctgggcctcccaagtagctgggaccacaggcacacactacacctggctattttttttactttttgtagagaaggagtctcgctaggtggcccagactggtcttgaactcctgggctcaaatgacccttccaccttggctctccaaagtgctgggactactggcctaagccaccgtacctggccgtttttctttttctttctttctttctttttttttttttttttgagacacagtctcactctgttgcccaggctggagtgcagtggtgcggtctcagctcactgtgcaacctccacctcccggttcaagcgattcttgtgcctcagccttccgagtagctgggattacaggtgtgcaccaccacgcccagctaatttttgtatttttagtacagatgaggttttaccatgttggccaggctggtctccaactcctgaccttaggtgatccacccacctcggcctcccaaagtgctgggattacagatgtcagccactgcgcccggcccattttctttgttttgagatggagttttgctcttgttgtccaggctggaatgcactggcacgatctcggctcactgcaacctctgcctcccacgttcaagcgattttcctgcctcagcctcctgagtagttgggattacaggcgcctgccaccacacccggctaatttccttgttgttgttttgtatttttagtagagtcggggtttcatcatgttggccaggctggtcttgaactcctgacctcaggtgatccacctgcatcagtctcccgaaatgtagggattacaggcatgagccactgcgcccagccccattttctttttaattgcgaaagacacacaacataaacgtttctatctcagccacttgtcagtgtaaagttcagtagcattaggcatattcccaccatcatgcgtctcatcctgaaacaccattctcctttgtctgatatgcagacatcatctaagaggcctagcagcattgcaaagacacacaaaaagtcatggccttggcctggggaactgggctggggcccaagccttttaatgccaagggcacagggctcactctttcagcagtcctgaccctcatcagttttaggacagttgtttaaaagtttagctatgttagtagccacttttgcttctgaaaagaaagcacttgtgtcaaagtacatcaaaagagacggaattacacctttaaaaaagtctatatcgggccgggcacggtggctcatgtctgtaatcccagcactttgggaggctgagggggcagatcacgaggtcaggagatcgagaccatcgtggctaacacggtgaaaccccgtctccactaaaaatacaaaaaaaaattagccgggcgtggtggcgggcgcctgtagtcccagctactcaggaggctgaggcagaagaatggcgtgaactcgggaggcggagcttgcggtaagccaagatccccccactgcactccagcctgggcaacagagcgagagtccatctcaaaaaacacaaaaacaaaaagtctatattacattcacaatgttttatcctttacaacagattcaactgcaggaaaccctatttctttctttcttttttttttttttgtatttttagtagagacggggtttcactgtgttagccaggatattctcgatctcctgacctcgtgatccgcctgcctaggaaaccccatttctaaaagcctttaagacttcctgggcatcctcttccaggagctccttgaggacaggacttgggctgtgtgcaatttaactctggctgcggcagcctgtaacagccagttaagatttattaagtgaatgtgattaaaagcctgcctgtttctcctgttcagctcatctgaactggaaagtgcagtcgtccctccggacactcctaggaggtttttatttctattcctgcaattctgggagaagacagaagccaggaaagtgtgaaatccaaccagaaggcaggaaagctggccatcctgagcacagggtctaggtgacgcatcaccaaagactgaaaacaatgtcaccctcacccacaacaactccagtgaaactttcgaatttcagtctaactaactgtactcatttttgactcttatttcagagccgattaccatgcaccttcagatgctaatggaagtggtcccaccggaggaagaccctgagtaacaagctccgtctcttgtagccaagtcagctgaatttattttcttaagcaatatttgtggttatttcttcctttttttcttacgaataaaatatactcagatgtttaaaa

SEQ ID NO: 206 - RNA, 1766 nt, Homo sapiens
  source 1..1766: mol_type = other RNA
gccatttctagggttggaccgtgcaggcacgggcggtcagctgggccgcagctcctccggctctgcagggtcacggaggaagccagctcccctagtccaggccgagcttgcacttgcgtcttgtctgctgctgctgaaccaagatttagctgtgcgccctccttgcagtctcctggaaccagcaggaggaaacatgggggatactggcctgagaaagcggagagaggatgagaagtcgatccagagccaagagcctaagaccaccagtctccaaaaggagctgggcctcatcagtggcatctccatcatcgtgggcaccatcattggctctgggatcttcgtttcccccaagtctgtgctcagcaacacggaagctgtggggccctgcctcatcatatgggcggcttgcggggtcctcgcgacgctgggtgccctgtgctttgcggagcttggcacaatgatcaccaagtcagggggagagtatccctacctgatggaggcctacgggcccatccccgcctacctcttctcctgggccagcctgatcgtcattaagcccacgtccttcgccatcatctgcctcagcttctccgagtatgtgtgtgcgcccttctatgtgggctgcaagcctcctcaaatcgttgtgaaatgcctggccgccgccgccatcttgttcatctcgacagtgaactcactgagcgtgcggctgggaagctacgtccagaacatcttcaccgcggccaagctggtgatcgtggccatcatcatcatcagcgggctggtgctcctggcccaaggaaacacaaagaattttgataattctttcgagggcgcccagctgtctgtgggagccatcagcctggcgttttacaatggactctgggcctatgatggatggaatcaactcaattacatcacagaagaacttagaaacccttacagaaacctgcctttggccattatcatcgggatccccctggtgacggcgtgctacatcctcatgaacgtgtcctacttcaccgtgatgactgccaccgaactcctgcagtcccaggcggtggctgtgacatttggtgaccgtgttctctatcctgcttcttggatcgttccactttttgtggcattttcaaccatcggtgctgctaacgggacctgcttcacagcgggcagactcatttacgtggcgggccgggagggtcacatgctcaaagtgctttcttacatcagcgtcaggcgcctcactccagcccccgccatcatcttttatggtatcatagcaacgatttatatcatccctggtgacataaactcgttagtcaattatttcagctttgccgcatggctgttttatggcctgacgattctaggactcatcgtgatgagatttacaaggaaagagctggaaaggcctatcaaggtgcccgtagtcattcccgtcttgatgacactcatctctgtgtttttggttctggctccaatcatcagcaagcccacctgggagtacctctactgtgtgctgtttatattaagcggccttttattttacttcctgtttgtccactacaagtttggatgggctcagaaaatctcaaagccgattaccatgcaccttcagatgctaatggaagtggtcccaccggaggaagaccctgagtaacaagctccgtctcttgtagccaagtcagctgaatttattttcttaagcaatatttgtggttatttcttcctttttttcttacgaataaaatatactcagatgtttaaaa

SEQ ID NO: 207 - RNA, 1752 nt, Homo sapiens
  source 1..1752: mol_type = other RNA
ggcacgggcggtcagctgggccgcagctcctccggctctgcagggtcacggaggaaggtaagtaagccagctcccctagtccaggccgagcttgcacttgcgtcttgtctgctgctgctgaaccaagatttagctgtgcgccctccttgcagtctcctggaaccagcaggaggaaacatgggggatactggcctgagaaagcggagagaggatgagaagtcgatccagagccaagagcctaagaccaccagtctccaaaaggagctgggcctcatcagtggcatctccatcatcgtgggcaccatcattggctctgggatcttcgtttcccccaagtctgtgctcagcaacacggaagctgtggggccctgcctcatcatatgggcggcttgcggggtcctcgcgacgctgggtgccctgtgctttgcggagcttggcacaatgatcaccaagtcagggggagagtatccctacctgatggaggcctacgggcccatccccgcctacctcttctcctgggccagcctgatcgtcattaagcccacgtccttcgccatcatctgcctcagcttctccgagtatgtgtgtgcgcccttctatgtgggctgcaagcctcctcaaatcgttgtgaaatgcctggccgccgccgccatcttgttcatctcgacagtgaactcactgagcgtgcggctgggaagctacgtccagaacatcttcaccgcggccaagctggtgatcgtggccatcatcatcatcagcgggctggtgctcctggcccaaggaaacacaaagaattttgataattctttcgagggcgcccagctgtctgtgggagccatcagcctggcgttttacaatggactctgggcctatgatggatggaatcaactcaattacatcacagaagaacttagaaacccttacagaaacctgcctttggccattatcatcgggatccccctggtgacggcgtgctacatcctcatgaacgtgtcctacttcaccgtgatgactgccaccgaactcctgcagtcccaggcggtggctgtgacatttggtgaccgtgttctctatcctgcttcttggatcgttccactttttgtggcattttcaaccatcggtgctgctaacgggacctgcttcacagcgggcagactcatttacgtggcgggccgggagggtcacatgctcaaagtgctttcttacatcagcgtcaggcgcctcactccagcccccgccatcatcttttatggtatcatagcaacgatttatatcatccctggtgacataaactcgttagtcaattatttcagctttgccgcatggctgttttatggcctgacgattctaggactcatcgtgatgagatttacaaggaaagagctggaaaggcctatcaaggtgcccgtagtcattcccgtcttgatgacactcatctctgtgtttttggttctggctccaatcatcagcaagcccacctgggagtacctctactgtgtgctgtttatattaagcggccttttattttacttcctgtttgtccactacaagtttggatgggctcagaaaatctcaaagccgattaccatgcaccttcagatgctaatggaagtggtcccaccggaggaagaccctgagtaacaagctccgtctcttgtagccaagtcagctgaatttattttcttaagcaatatttgtggttatttcttcctttttttcttacgaataaaatatactcagatgtttaaaata

SEQ ID NO: 208 - RNA, 1568 nt, Homo sapiens
  source 1..1568: mol_type = other RNA
atttctagggttggaccgtgcaggcacgggcggtcagctgggccgcagctcctccggctctgcagggtcacggaggaagtctcctggaaccagcaggaggaaacatgggggatactggcctgagaaagcggagagaggatgagaagtcgatccagagccaagagcctaagaccaccagtctccaaaaggagctgggcctcatcagtggcatctccatcatcgtgggcaccatcattggctctgggatcttcgtttcccccaagtctgtgctcagcaacacggaagctgtggggccctgcctcatcatatgggcggcttgcggggtcctcgcgacgctgggtgccctgtgctttgcggagcttggcacaatgatcaccaagtcagggggagagtatccctacctgatggaggcctacgggcccatccccgcctacctcttctcctgggccagcctgatcgtcattaagcccacgtccttcgccatcatctgcctcagcttctccgagtatgtgtgtgcgcccttctatgtgggctgcaagcctcctcaaatcgttgtgaaatgcctggccgccgccgccatcttgttcatctcgacagtgaactcactgagcgtgcggctgggaagctacgtccagaacatcttcaccgcggccaagctggtgatcgtggccatcatcatcatcagcgggctggtgctcctggcccaaggaaacacaaagaattttgataattctttcgagggcgcccagctgtctgtgggagccatcagcctggcgttttacaatggactctgggcctatgatggatggaatcaactcaattacatcacagaagaacttagaaacccttacagaaacctgcctttggccattatcatcgggatccccctggtgacggcgtgctacatcctcatgaacgtgtcctacttcaccgtgatgactgccaccgaactcctgcagtcccaggcggtggctgtgacatttggtgaccgtgttctctatcctgcttcttggatcgttccactttttgtggcattttcaaccatcggtgctgctaacgggacctgcttcacagcgggcagactcatttacgtggcgggccgggagggtcacatgctcaaagtgctttcttacatcagcgtcaggcgcctcactccagcccccgccatcatcttttatggtatcatagcaacgatttatatcatccctggtgacataaactcgttagtcaattatttcagctttgccgcatggctgttttatggcctgacgattctaggactcatcgtgatgagatttacaaggaaagagctggaaaggcctatcaaggtgcccgtagtcattcccgtcttgatgacactcatctctgtgtttttggttctggctccaatcatcagcaagcccacctgggagtacctctactgtgtgctgtttatattaagcggccttttattttacttcctgtttgtccactacaagtttggatgggctcagaaaatctcaaagccgattaccatgcaccttcagatgctaatggaagtggtcccaccggaggaagaccctgagtaa

SEQ ID NO: 209 - RNA, 1775 nt, Homo sapiens
  source 1..1775: mol_type = other RNA
gccatttctagggttggaccgtgcaggcacgggcggtcagctgggccgcagctcctccggctctgcagggtcacggaggaaggtaagtaagccagctcccctagtccaggccgagcttgcacttgcgtcttgtctgctgctgctgaaccaagatttagctgtgcgccctccttgcagtctcctggaaccagcaggaggaaacatgggggatactggcctgagaaagcggagagaggatgagaagtcgatccagagccaagagcctaagaccaccagtctccaaaaggagctgggcctcatcagtggcatctccatcatcgtgggcaccatcattggctctgggatcttcgtttcccccaagtctgtgctcagcaacacggaagctgtggggccctgcctcatcatatgggcggcttgcggggtcctcgcgacgctgggtgccctgtgctttgcggagcttggcacaatgatcaccaagtcagggggagagtatccctacctgatggaggcctacgggcccatccccgcctacctcttctcctgggccagcctgatcgtcattaagcccacgtccttcgccatcatctgcctcagcttctccgagtatgtgtgtgcgcccttctatgtgggctgcaagcctcctcaaatcgttgtgaaatgcctggccgccgccgccatcttgttcatctcgacagtgaactcactgagcgtgcggctgggaagctacgtccagaacatcttcaccgcggccaagctggtgatcgtggccatcatcatcatcagcgggctggtgctcctggcccaaggaaacacaaagaattttgataattctttcgagggcgcccagctgtctgtgggagccatcagcctggcgttttacaatggactctgggcctatgatggatggaatcaactcaattacatcacagaagaacttagaaacccttacagaaacctgcctttggccattatcatcgggatccccctggtgacggcgtgctacatcctcatgaacgtgtcctacttcaccgtgatgactgccaccgaactcctgcagtcccaggcggtggctgtgacatttggtgaccgtgttctctatcctgcttcttggatcgttccactttttgtggcattttcaaccatcggtgctgctaacgggacctgcttcacagcgggcagactcatttacgtggcgggccgggagggtcacatgctcaaagtgctttcttacatcagcgtcaggcgcctcactccagcccccgccatcatcttttatggtatcatagcaacgatttatatcatccctggtgacataaactcgttagtcaattatttcagctttgccgcatggctgttttatggcctgacgattctaggactcatcgtgatgagatttacaaggaaagagctggaaaggcctatcaaggtgcccgtagtcattcccgtcttgatgacactcatctctgtgtttttggttctggctccaatcatcagcaagcccacctgggagtacctctactgtgtgctgtttatattaagcggccttttattttacttcctgtttgtccactacaagtttggatgggctcagaaaatctcaaagccgattaccatgcaccttcagatgctaatggaagtggtcccaccggaggaagaccctgagtaacaagctccgtctcttgtagccaagtcagctgaatttattttcttaagcaatatttgtggttatttcttcctttttttcttacgaataaaatatactcagatgtttaaaa

SEQ ID NO: 210 - RNA, 1680 nt, Homo sapiens
  source 1..1680: mol_type = other RNA
gccatttctagggttggaccgtgcaggcacgggcggtcagctgggccgcagctcctccggctctgcagggtcacggaggaagtctcctggaaccagcaggaggaaacatgggggatactggcctgagaaagcggagagaggatgagaagtcgatccagagccaagagcctaagaccaccagtctccaaaaggagctgggcctcatcagtggcatctccatcatcgtgggcaccatcattggctctgggatcttcgtttcccccaagtctgtgctcagcaacacggaagctgtggggccctgcctcatcatatgggcggcttgcggggtcctcgcgacgctgggtgccctgtgctttgcggagcttggcacaatgatcaccaagtcagggggagagtatccctacctgatggaggcctacgggcccatccccgcctacctcttctcctgggccagcctgatcgtcattaagcccacgtccttcgccatcatctgcctcagcttctccgagtatgtgtgtgcgcccttctatgtgggctgcaagcctcctcaaatcgttgtgaaatgcctggccgccgccgccatcttgttcatctcgacagtgaactcactgagcgtgcggctgggaagctacgtccagaacatcttcaccgcggccaagctggtgatcgtggccatcatcatcatcagcgggctggtgctcctggcccaaggaaacacaaagaattttgataattctttcgagggcgcccagctgtctgtgggagccatcagcctggcgttttacaatggactctgggcctatgatggatggaatcaactcaattacatcacagaagaacttagaaacccttacagaaacctgcctttggccattatcatcgggatccccctggtgacggcgtgctacatcctcatgaacgtgtcctacttcaccgtgatgactgccaccgaactcctgcagtcccaggcggtggctgtgacatttggtgaccgtgttctctatcctgcttcttggatcgttccactttttgtggcattttcaaccatcggtgctgctaacgggacctgcttcacagcgggcagactcatttacgtggcgggccgggagggtcacatgctcaaagtgctttcttacatcagcgtcaggcgcctcactccagcccccgccatcatcttttatggtatcatagcaacgatttatatcatccctggtgacataaactcgttagtcaattatttcagctttgccgcatggctgttttatggcctgacgattctaggactcatcgtgatgagatttacaaggaaagagctggaaaggcctatcaaggtgcccgtagtcattcccgtcttgatgacactcatctctgtgtttttggttctggctccaatcatcagcaagcccacctgggagtacctctactgtgtgctgtttatattaagcggccttttattttacttcctgtttgtccactacaagtttggatgggctcagaaaatctcaaagccgattaccatgcaccttcagatgctaatggaagtggtcccaccggaggaagaccctgagtaacaagctccgtctcttgtagccaagtcagctgaatttattttcttaagcaatatttgtggttatttcttcctttttttcttacgaataaaatatactcagatgtttaaaa

SEQ ID NO: 211 - RNA, 1651 nt, Homo sapiens
  source 1..1651: mol_type = other RNA
tgctgaaccaagatttagctgtgcgccctccttgcagtctcctggaaccagcaggaggaaacatgggggatactggcctgagaaagcggagagaggatgagaagtcgatccagagccaagagcctaagaccaccagtctccaaaaggagctgggcctcatcagtggcatctccatcatcgtgggcaccatcattggctctgggatcttcgtttcctccaagtctgtgctcagcaacacggaagctgtggggccctgcctcatcatatgggcggcttgcggggtcctcgcgacgctgggtgccctgtgctttgcggagcttggcacaatgatcaccaagtcagggggagagtatccctacctgatggaggcctacgggcccatccccgcctacctcttctcctgggccagcctgatcgtcattaagcccacgtccttcgccatcatctgcctcagcttctccgagtatgtgtgtgcgcccttctatgtgggctgcaagcctcctcaaatcgttgtgaaatgcctggccgccgccgccatcttgttcatctcgacagtgaactcactgagcgtgcggctgggaagctacgtccagaacatcttcaccgcggccaagctggtgatcgtggccatcatcatcatcagcgggctggtgctcctggcccaaggaaacacaaagaattttgataattctttcgagggcgcccagctgtctgtgggagccatcagcctggcgttttacaatggactctgggcctatgatggatggaatcaactcaattacatcacagaagaacttagaaacccttacagaaacctgcctttggccattatcatcgggatccccctggtgacggcgtgctacatcctcatgaacgtgtcctacttcaccgtgatgactgccaccgaactcctgcagtcccaggcggtggctgtgacatttggtgaccgtgttctctatcctgcttcttggatcgttccactttttgtggcattttcaaccatcggtgctgctaacgggacctgcttcacagcgggcagactcatttacgtggcgggccgggagggtcacatgctcaaagtgctttcttacatcagcgtcaggcgcctcactccagcccccgccatcatcttttatggtatcatagcaacgatttatatcatccctggtgacataaactcgttagtcaattatttcagctttgctgcatggctgttttatggcctgacgattctaggactcatcgtgatgagatttacaaggaaagagctggaaaggcctatcaaggtgcccgtagtcattcccgtcttgatgacactcatctctgtgtttttggttctggctccaatcatcagcaagcccacctgggagtacctctactgtgtgctgtttatattaagcggccttttattttacttcctgtttgtccactacaagtttggatgggctcagaaaatctcaaagccgattaccatgcaccttcagatgctaatggaagtggtcccaccggaggaagaccctgagtaacaagctccgtctcttgtagccaagtcagctgaatttattttcttaagcaatatttgtggttatttcttcctttttttcctacgaataaaatatactcagatgtttaaaaaaaaaaaaaaaaaaaa

SEQ ID NO: 212 - RNA, 1814 nt, Homo sapiens
  source 1..1814: mol_type = other RNA
ggcacgagggcacgggcggtcagctgggccgcagctcctccggctctgcagggtcacggaggaaggtaagtaagccagctcccctagtccaggccgagcttgcacttgcgtcttgtctgctgctgctgaaccaagatttagctgtgcgccctccttgcagtctcctggaaccagcaggaggaaacatgggggatactggcctgagaaagcggagagaggatgagaagtcgatccagagccaagagcctaagaccaccagtctccaaaaggagctgggcctcatcagtggcatctccatcatcgtgggcaccatcattggctctgggatcttcgtttcccccaagtctgtgctcagcaacacggaagctgtggggccctgcctcatcatatgggcggcttgcggggtcctcgcgacgctgggtgccctgtgctttgcggagcttggcacaatgatcaccaagtcagggggagagtatccctacctgatggaggcctacgggcccatccccgcctacctcttctcctgggccagcctgatcgtcattaagcccacgtccttcgccatcatctgcctcagcttctccgagtatgtgtgtgcgcccttctatgtgggctgcaagcctcctcaaatcgttgtgaaatgcctggccgccgccgccatcttgttcatctcgacagtgaactcactgagcgtgcggctgggaagctacgtccagaacatcttcaccgcggccaagctggtgatcgtggccatcatcatcatcagcgggctggtgctcctggcccaaggaaacacaaagaattttgataattctttcgagggcgcccagctgtctgtgggagccatcagcctggcgttttacaatggactctgggcctatgatggatggaatcaactcaattacatcacagaagaacttagaaacccttacagaaacctgcctttggccattatcatcgggatccccctggtgacggcgtgctacatcctcatgaacgtgtcctacttcaccgtgatgactgccaccgaactcctgcagtcccaggcggtggctgtgacatttggtgaccgtgttctctatcctgcttcttggatcgttccactttttgtggcattttcaaccatcggtgctgctaacgggacctgcttcacagcgggcagactcatttacgtggcgggccgggagggtcacatgctcaaagtgctttcttacatcagcgtcaggcgcctcactccagcccccgccatcatcttttatggtatcatagcaacgatttatatcatccctggtgacataaactcgttagtcaattatttcagctttgctgcatggctgttttatggcctgacgattctaggactcatcgtgatgagatttacaaggaaagagctggaaaggcctatcaaggtgcccgtagtcattcccgtcttgatgacactcatctctgtgtttttggttctggctccaatcatcagcaagcccacctgggagtacctctactgtgtgctgtttatattaagcggccttttattttacttcctgtttgtccactacaagtttggatgggctcagaaaatctcaaagccgattaccatgcaccttcagatgctaatggaagtggtcccaccggaggaagaccctgagtaacaagctccgtctcttgtagccaagtcagctgaatttattttcttaagcaatatttgtggttatttcttcctttttttcttacgaataaaatatactcagatgtttaaaaaaaaaaaaaaaaaaaaaaaaaaaaaaaaaaaaaaaaaaaaaaaaaaaaaaaaaaaa

SEQ ID NO: 213 - RNA, 1664 nt, Homo sapiens
  source 1..1664: mol_type = other RNA
cgagcaggcacgggcggtcagctgggccgcagctcctccggctctgcagggtcacggaggaagtctcctggaaccagcaggaggaaacatgggggatactggcctgagaaagcggagagaggatgagaagtcgatccagagccaagagcctaagaccaccagtctccaaaaggagctgggcctcatcagtggcatctccatcatcgtgggcaccatcattggctctgggatcttcgtttcccccaagtctgtgctcagcaacacggaagctgtggggccctgcctcatcatatgggcggcttgcggggtcctcgcgacgctgggtgccctgtgctttgcggagcttggcacaatgatcaccaagtcagggggagagtatccctacctgatggaggcctacgggcccatccccgcctacctcttctcctgggccagcctgatcgtcattaagcccacgtccttcgccatcatctgcctcagcttctccgagtatgtgtgtgcgcccttctatgtgggctgcaagcctcctcaaatcgttgtgaaatgcctggccgccgccgccatcttgttcatctcgacagtgaactcactgagcgtgcggctgggaagctacgtccagaacatcttcaccgcggccaagctggtgatcgtggccatcatcatcatcagcgggctggtgctcctggcccaaggaaacacaaagaattttgataattctttcgagggcgcccagctgtctgtgggagccatcagcctggcgttttacaatggactctgggcctatgatggatggaatcaactcaattacatcacagaagaacttagaaacccttacagaaacctgcctttggccattatcatcgggatccccctggtgacggcgtgctacatcctcatgaacgtgtcctacttcaccgtgatgactgccaccgaactcctgcagtcccaggcggtggctgtgacatttggtgaccgtgttctctatcctgcttcttggatcgttccactttttgtggcattttcaaccatcggtgctgctaacgggacctgcttcacagcgggcagactcatttacgtggcgggccgggagggtcacatgctcaaagtgctttcttacatcagcgtcaggcgcctcactccagcccccgccatcatcttttatggtatcatagcaacgatttatatcatccctggtgacataaactcgttagtcaattatttcagctttgccgcatggctgttttatggcctgacgattctaggactcatcgtgatgagatttacaaggaaagagctggaaaggcctatcaaggtgcccgtagtcattcccgtcttgatgacactcatctctgtgtttttggttctggctccaatcatcagcaagcccacctgggagtacctctactgtgtgctgtttatattaagcggccttttattttacttcctgtttgtccactacaagtttggatgggctcagaaaatctcaaagccgattaccatgcaccttcagatgctaatggaagtggtcccaccggaggaagaccctgagtaacaagctccgtctcttgtagccaagtcagctgaatttattttcttaagcaatatttgtggttatttcttcctttttttcttacgaataaaatatactcagatgtttaaaaaaa

SEQ ID NO: 214 - RNA, 1790 nt, Homo sapiens
  source 1..1790: mol_type = other RNA
ccatttctagggttggaccgagcaggcacgggcggtcagctgggccgcagctcctccggctctgcagggtcacggaggaagccagctcccctagtccaggccgagcttgcacttgcgtcttgtctgctgctgctgaaccaagatttagctgtgcgccctccttgcagtctcctggaaccagcaggaggaaacatgggggatactggcctgagaaagcggagagaggatgagaagtcgatccagagccaagagcctaagaccaccagtctccaaaaggagctgggcctcatcagtggcatctccatcatcgtgggcaccatcattggctctgggatcttcgtttcccccaagtctgtgctcagcaacacggaagctgtggggccctgcctcatcatatgggcggcttgcggggtcctcgcgacgctgggtgccctgtgctttgcggagcttggcacaatgatcaccaagtcagggggagagtatccctacctgatggaggcctacgggcccatccccgcctacctcttctcctgggccagcctgatcgtcattaagcccacgtccttcgccatcatctgcctcagcttctccgagtatgtgtgtgcgcccttctatgtgggctgcaagcctcctcaaatcgttgtgaaatgcctggccgccgccgccatcttgttcatctcgacagtgaactcactgagcgtgcggctgggaagctacgtccagaacatcttcaccgcggccaagctggtgatcgtggccatcatcatcatcagcgggctggtgctcctggcccaaggaaacacaaagaattttgataattctttcgagggcgcccagctgtctgtgggagccatcagcctggcgttttacaatggactctgggcctatgatggatggaatcaactcaattacatcacagaagaacttagaaacccttacagaaacctgcctttggccattatcatcgggatccccctggtgacggcgtgctacatcctcatgaacgtgtcctacttcaccgtgatgactgccaccgaactcctgcagtcccaggcggtggctgtgacatttggtgaccgtgttctctatcctgcttcttggatcgttccactttttgtggcattttcaaccatcggtgctgctaacgggacctgcttcacagcgggcagactcatttacgtggcgggccgggagggtcacatgctcaaagtgctttcttacatcagcgtcaggcgcctcactccagcccccgccatcatcttttatggtatcatagcaacgatttatatcatccctggtgacataaactcgttagtcaattatttcagctttgccgcatggctgttttatggcctgacgattctaggactcatcgtgatgagatttacaaggaaagagctggaaaggcctatcaaggtgcccgtagtcattcccgtcttgatgacactcatctctgtgtttttggttctggctccaatcatcagcaagcccacctgggagtacctctactgtgtgctgtttatattaagcggccttttattttacttcctgtttgtccactacaagtttggatgggctcagaaaatctcaaagccgattaccatgcaccttcagatgctaatggaagtggtcccaccggaggaagaccctgagtaacaagctccgtctcttgtagccaagtcagctgaatttattttcttaagcaatatttgtggttatttcttcctttttttcttacgaataaaatatactcagatgttaaaaaaaaaaaaaaaaaaaaaaaaaaaaaa

SEQ ID NO: 215 - RNA, 1724 nt, Homo sapiens
  source 1..1724: mol_type = other RNA
attttctagggttggaccgagcaggcacgggcggtcagctgggccgcagctcctccggctctgcagggtcacggaggaagccagctcccctagtccaggccgagcttgcacttgcgtcttgcctgctgctgctgaaccaagatttagctgtgcgccctccttgcagtctcctggaaccagcaggaggaaacatgggggatactggcctgagaaagcggagagaggatgagaagtcgatccagagccaagagcctaagaccaccagtctccaaaaggagctgggcctcatcagtggcatctccatcatcgtgggcaccatcattggctctgggatcttcgtttcccccaagtctgtgctcagcaacacggaagctgtggggccctgcctcatcatatgggcggcttgcggggtcctcgcgacgctgggtgccctgtgctttgcggagcttggcacaatgatcaccaagtcagggggagagtatccctacctgatggaggcctacgggcccatccccgcctacctcttctcctgggccagcctgatcgtcattaagcccacgtccttcgccatcatctgcctcagcttctccgagtatgtgtgtgcgcccttctatgtgggctgcaagcctcctcaaatcgttgtgaaatgcctggtcgccgccgccatcttgttcatctcgacagtgaactcactgagcgtgcggctgggaagctacgtccagaacatcttcaccgcggccaagctggtgatcgtggccatcatcatcatcagcgggctggtgctcctggcccaaggaaacacaaagaattttgataattctttcgagggcgcccagctgtctgtgggagccatcagcctggcgttttacaatggactctgggcctatgatggatggaatcaactcaattacatcacagaagaacttagaaacccttacagaaacctgcctttggccattatcatcgggatccccctggtgacggcgtgctacatcctcatgaacgtgtcctacttcaccgtgatgactgccaccgaactcctgcagtcccaggcggtggctgtgacatttggtgaccgtgttctctatcctgcttcttggatcgttccactttttgtggcattttcaaccatcggtgctgctaacgggacctgcttcacagcgggcagactcatttacgtggcgggccgggagggtcacatgctcaaagtgctttcttacatcagcgtcaggcgcctcactccagcccccgccatcatcttttatggtatcatagcaacgatttatatcatccctggtgacataaactcgttagtcaattatttcagctttgccgcatggctgttttatggcctgacgattctaggactcatcgtgatgagatttacaaggaaagagctggaaaggcctatcaaggtgcccgtagtcattcccgtcttgatgacactcatctctgtgtttttggttctggctccaatcatcagcaagcccacctgggagtacctctactgtgtgctgtttatattaagcggccttttattttacttcctgtttgtccactacaagtttggatgggctcagaaaatctcaaagccgattaccatgcaccttcagatgctaatggaagtggtcccaccggaggaagaccctgagtaacaagctccgtctcttgtagccaagtcagctgaatttattttcttaagcaatatttgtggttatttcttc

SEQ ID NO: 216 - RNA, 1761 nt, Homo sapiens
  source 1..1761: mol_type = other RNA
ccatttctagggttggaccgtgcaggcacgggcggtcagctgggccgcagctcctccggctctgcagggtcacggaggaagccagctcccctagtccaggccgagcttgcacttgcgtcttgtctgctgctgctgaaccaagatttagctgtgcgccctccttgcagtctcctggaaccagcaggaggaaacatgggggatactggcctgagaaagcggagagaggatgagaagtcgatccagagccaagagcctaagaccaccagtctccaaaaggagctgggcctcatcagtggcatctccatcatcgtgggcaccatcattggctctgggatcttcgtttcccccaagtctgtgctcagcaacacggaagctgtggggccctgcctcatcatatgggcggcttgcggggtcctcgcgacgctgggtgccctgtgctttgcggagcttggcacaatgatcaccaagtcagggggagagtatccctacctgatggaggcctacgggcccatccccgcctacctcttctcctgggccagcctgatcgtcattaagcccacgtccttcgccatcatctgcctcagcttctccgagtatgtgtgtgcgcccttctatgtgggctgcaagcctcctcaaatcgttgtgaaatgcctggccgccgccgccatcttgttcatctcgacagtgaactcactgagcgtgcggctgggaagctacgtccagaacatcttcaccgcggccaagctggtgatcgtggccatcatcatcatcagcgggctggtgctcctggcccaaggaaacacaaagaattttgataattctttcgagggcgcccagctgtctgtgggagccatcagcctggcgttttacaatggactctgggcctatgatggatggaatcaactcaattacatcacagaagaacttagaaacccttacagaaacctgcctttggccattatcatcgggatccccctggtgacggcgtgctacatcctcatgaacgtgtcctacttcaccgtgatgactgccaccgaactcctgcagtcccaggcggtggctgtgacatttggtgaccgtgttctctatcctgcttcttggatcgttccactttttgtggcattttcaaccatcggtgctgctaacgggacctgcttcacagcgggcagactcatttacgtggcgggccgggagggtcacatgctcaaagtgctttcttacatcagcgtcaggcgcctcactccagcccccgccatcatcttttatggtatcatagcaacgatttatatcatccctggtgacataaactcgttagtcaattatttcagctttgccgcatggctgttttatggcctgacgattctaggactcatcgtgatgagatttacaaggaaagagctggaaaggcctatcaaggtgcccgtagtcattcccgtcttgatgacactcatctctgtgtttttggttctggctccaatcatcagcaagcccacctgggagtacctctactgtgtgctgtttatattaagcggccttttattttacttcctgtttgtccactacaagtttggatgggctcagaaaatctcaaagccgattaccatgcaccttcagatgctaatggaagtggtcccaccggaggaagaccctgagtaacaagctccgtctcttgtagccaagtcagctgaatttattttcttaagcaatatttgtggttatttcttcctttttttcttacgaataaaatatactcagatgttt

SEQ ID NO: 217 - DNA, 1766 bp, Homo sapiens
  source 1..1766: mol_type = genomic DNA
gccatttctagggttggaccgtgcaggcacgggcggtcagctgggccgcagctcctccggctctgcagggtcacggaggaagccagctcccctagtccaggccgagcttgcacttgcgtcttgtctgctgctgctgaaccaagatttagctgtgcgccctccttgcagtctcctggaaccagcaggaggaaacatgggggatactggcctgagaaagcggagagaggatgagaagtcgatccagagccaagagcctaagaccaccagtctccaaaaggagctgggcctcatcagtggcatctccatcatcgtgggcaccatcattggctctgggatcttcgtttcccccaagtctgtgctcagcaacacggaagctgtggggccctgcctcatcatatgggcggcttgcggggtcctcgcgacgctgggtgccctgtgctttgcggagcttggcacaatgatcaccaagtcagggggagagtatccctacctgatggaggcctacgggcccatccccgcctacctcttctcctgggccagcctgatcgtcattaagcccacgtccttcgccatcatctgcctcagcttctccgagtatgtgtgtgcgcccttctatgtgggctgcaagcctcctcaaatcgttgtgaaatgcctggccgccgccgccatcttgttcatctcgacagtgaactcactgagcgtgcggctgggaagctacgtccagaacatcttcaccgcggccaagctggtgatcgtggccatcatcatcatcagcgggctggtgctcctggcccaaggaaacacaaagaattttgataattctttcgagggcgcccagctgtctgtgggagccatcagcctggcgttttacaatggactctgggcctatgatggatggaatcaactcaattacatcacagaagaacttagaaacccttacagaaacctgcctttggccattatcatcgggatccccctggtgacggcgtgctacatcctcatgaacgtgtcctacttcaccgtgatgactgccaccgaactcctgcagtcccaggcggtggctgtgacatttggtgaccgtgttctctatcctgcttcttggatcgttccactttttgtggcattttcaaccatcggtgctgctaacgggacctgcttcacagcgggcagactcatttacgtggcgggccgggagggtcacatgctcaaagtgctttcttacatcagcgtcaggcgcctcactccagcccccgccatcatcttttatggtatcatagcaacgatttatatcatccctggtgacataaactcgttagtcaattatttcagctttgccgcatggctgttttatggcctgacgattctaggactcatcgtgatgagatttacaaggaaagagctggaaaggcctatcaaggtgcccgtagtcattcccgtcttgatgacactcatctctgtgtttttggttctggctccaatcatcagcaagcccacctgggagtacctctactgtgtgctgtttatattaagcggccttttattttacttcctgtttgtccactacaagtttggatgggctcagaaaatctcaaagccgattaccatgcaccttcagatgctaatggaagtggtcccaccggaggaagaccctgagtaacaagctccgtctcttgtagccaagtcagctgaatttattttcttaagcaatatttgtggttatttcttcctttttttcttacgaataaaatatactcagatgtttaaaa

SEQ ID NO: 218 - DNA, 1752 bp, Homo sapiens
  source 1..1752: mol_type = genomic DNA
ggcacgggcggtcagctgggccgcagctcctccggctctgcagggtcacggaggaaggtaagtaagccagctcccctagtccaggccgagcttgcacttgcgtcttgtctgctgctgctgaaccaagatttagctgtgcgccctccttgcagtctcctggaaccagcaggaggaaacatgggggatactggcctgagaaagcggagagaggatgagaagtcgatccagagccaagagcctaagaccaccagtctccaaaaggagctgggcctcatcagtggcatctccatcatcgtgggcaccatcattggctctgggatcttcgtttcccccaagtctgtgctcagcaacacggaagctgtggggccctgcctcatcatatgggcggcttgcggggtcctcgcgacgctgggtgccctgtgctttgcggagcttggcacaatgatcaccaagtcagggggagagtatccctacctgatggaggcctacgggcccatccccgcctacctcttctcctgggccagcctgatcgtcattaagcccacgtccttcgccatcatctgcctcagcttctccgagtatgtgtgtgcgcccttctatgtgggctgcaagcctcctcaaatcgttgtgaaatgcctggccgccgccgccatcttgttcatctcgacagtgaactcactgagcgtgcggctgggaagctacgtccagaacatcttcaccgcggccaagctggtgatcgtggccatcatcatcatcagcgggctggtgctcctggcccaaggaaacacaaagaattttgataattctttcgagggcgcccagctgtctgtgggagccatcagcctggcgttttacaatggactctgggcctatgatggatggaatcaactcaattacatcacagaagaacttagaaacccttacagaaacctgcctttggccattatcatcgggatccccctggtgacggcgtgctacatcctcatgaacgtgtcctacttcaccgtgatgactgccaccgaactcctgcagtcccaggcggtggctgtgacatttggtgaccgtgttctctatcctgcttcttggatcgttccactttttgtggcattttcaaccatcggtgctgctaacgggacctgcttcacagcgggcagactcatttacgtggcgggccgggagggtcacatgctcaaagtgctttcttacatcagcgtcaggcgcctcactccagcccccgccatcatcttttatggtatcatagcaacgatttatatcatccctggtgacataaactcgttagtcaattatttcagctttgccgcatggctgttttatggcctgacgattctaggactcatcgtgatgagatttacaaggaaagagctggaaaggcctatcaaggtgcccgtagtcattcccgtcttgatgacactcatctctgtgtttttggttctggctccaatcatcagcaagcccacctgggagtacctctactgtgtgctgtttatattaagcggccttttattttacttcctgtttgtccactacaagtttggatgggctcagaaaatctcaaagccgattaccatgcaccttcagatgctaatggaagtggtcccaccggaggaagaccctgagtaacaagctccgtctcttgtagccaagtcagctgaatttattttcttaagcaatatttgtggttatttcttcctttttttcttacgaataaaatatactcagatgtttaaaata

SEQ ID NO: 219 - DNA, 1568 bp, Homo sapiens
  source 1..1568: mol_type = genomic DNA
atttctagggttggaccgtgcaggcacgggcggtcagctgggccgcagctcctccggctctgcagggtcacggaggaagtctcctggaaccagcaggaggaaacatgggggatactggcctgagaaagcggagagaggatgagaagtcgatccagagccaagagcctaagaccaccagtctccaaaaggagctgggcctcatcagtggcatctccatcatcgtgggcaccatcattggctctgggatcttcgtttcccccaagtctgtgctcagcaacacggaagctgtggggccctgcctcatcatatgggcggcttgcggggtcctcgcgacgctgggtgccctgtgctttgcggagcttggcacaatgatcaccaagtcagggggagagtatccctacctgatggaggcctacgggcccatccccgcctacctcttctcctgggccagcctgatcgtcattaagcccacgtccttcgccatcatctgcctcagcttctccgagtatgtgtgtgcgcccttctatgtgggctgcaagcctcctcaaatcgttgtgaaatgcctggccgccgccgccatcttgttcatctcgacagtgaactcactgagcgtgcggctgggaagctacgtccagaacatcttcaccgcggccaagctggtgatcgtggccatcatcatcatcagcgggctggtgctcctggcccaaggaaacacaaagaattttgataattctttcgagggcgcccagctgtctgtgggagccatcagcctggcgttttacaatggactctgggcctatgatggatggaatcaactcaattacatcacagaagaacttagaaacccttacagaaacctgcctttggccattatcatcgggatccccctggtgacggcgtgctacatcctcatgaacgtgtcctacttcaccgtgatgactgccaccgaactcctgcagtcccaggcggtggctgtgacatttggtgaccgtgttctctatcctgcttcttggatcgttccactttttgtggcattttcaaccatcggtgctgctaacgggacctgcttcacagcgggcagactcatttacgtggcgggccgggagggtcacatgctcaaagtgctttcttacatcagcgtcaggcgcctcactccagcccccgccatcatcttttatggtatcatagcaacgatttatatcatccctggtgacataaactcgttagtcaattatttcagctttgccgcatggctgttttatggcctgacgattctaggactcatcgtgatgagatttacaaggaaagagctggaaaggcctatcaaggtgcccgtagtcattcccgtcttgatgacactcatctctgtgtttttggttctggctccaatcatcagcaagcccacctgggagtacctctactgtgtgctgtttatattaagcggccttttattttacttcctgtttgtccactacaagtttggatgggctcagaaaatctcaaagccgattaccatgcaccttcagatgctaatggaagtggtcccaccggaggaagaccctgagtaa

SEQ ID NO: 220 - DNA, 1775 bp, Homo sapiens
  source 1..1775: mol_type = genomic DNA
gccatttctagggttggaccgtgcaggcacgggcggtcagctgggccgcagctcctccggctctgcagggtcacggaggaaggtaagtaagccagctcccctagtccaggccgagcttgcacttgcgtcttgtctgctgctgctgaaccaagatttagctgtgcgccctccttgcagtctcctggaaccagcaggaggaaacatgggggatactggcctgagaaagcggagagaggatgagaagtcgatccagagccaagagcctaagaccaccagtctccaaaaggagctgggcctcatcagtggcatctccatcatcgtgggcaccatcattggctctgggatcttcgtttcccccaagtctgtgctcagcaacacggaagctgtggggccctgcctcatcatatgggcggcttgcggggtcctcgcgacgctgggtgccctgtgctttgcggagcttggcacaatgatcaccaagtcagggggagagtatccctacctgatggaggcctacgggcccatccccgcctacctcttctcctgggccagcctgatcgtcattaagcccacgtccttcgccatcatctgcctcagcttctccgagtatgtgtgtgcgcccttctatgtgggctgcaagcctcctcaaatcgttgtgaaatgcctggccgccgccgccatcttgttcatctcgacagtgaactcactgagcgtgcggctgggaagctacgtccagaacatcttcaccgcggccaagctggtgatcgtggccatcatcatcatcagcgggctggtgctcctggcccaaggaaacacaaagaattttgataattctttcgagggcgcccagctgtctgtgggagccatcagcctggcgttttacaatggactctgggcctatgatggatggaatcaactcaattacatcacagaagaacttagaaacccttacagaaacctgcctttggccattatcatcgggatccccctggtgacggcgtgctacatcctcatgaacgtgtcctacttcaccgtgatgactgccaccgaactcctgcagtcccaggcggtggctgtgacatttggtgaccgtgttctctatcctgcttcttggatcgttccactttttgtggcattttcaaccatcggtgctgctaacgggacctgcttcacagcgggcagactcatttacgtggcgggccgggagggtcacatgctcaaagtgctttcttacatcagcgtcaggcgcctcactccagcccccgccatcatcttttatggtatcatagcaacgatttatatcatccctggtgacataaactcgttagtcaattatttcagctttgccgcatggctgttttatggcctgacgattctaggactcatcgtgatgagatttacaaggaaagagctggaaaggcctatcaaggtgcccgtagtcattcccgtcttgatgacactcatctctgtgtttttggttctggctccaatcatcagcaagcccacctgggagtacctctactgtgtgctgtttatattaagcggccttttattttacttcctgtttgtccactacaagtttggatgggctcagaaaatctcaaagccgattaccatgcaccttcagatgctaatggaagtggtcccaccggaggaagaccctgagtaacaagctccgtctcttgtagccaagtcagctgaatttattttcttaagcaatatttgtggttatttcttcctttttttcttacgaataaaatatactcagatgtttaaaa

SEQ ID NO: 221 - DNA, 1680 bp, Homo sapiens
  source 1..1680: mol_type = genomic DNA
gccatttctagggttggaccgtgcaggcacgggcggtcagctgggccgcagctcctccggctctgcagggtcacggaggaagtctcctggaaccagcaggaggaaacatgggggatactggcctgagaaagcggagagaggatgagaagtcgatccagagccaagagcctaagaccaccagtctccaaaaggagctgggcctcatcagtggcatctccatcatcgtgggcaccatcattggctctgggatcttcgtttcccccaagtctgtgctcagcaacacggaagctgtggggccctgcctcatcatatgggcggcttgcggggtcctcgcgacgctgggtgccctgtgctttgcggagcttggcacaatgatcaccaagtcagggggagagtatccctacctgatggaggcctacgggcccatccccgcctacctcttctcctgggccagcctgatcgtcattaagcccacgtccttcgccatcatctgcctcagcttctccgagtatgtgtgtgcgcccttctatgtgggctgcaagcctcctcaaatcgttgtgaaatgcctggccgccgccgccatcttgttcatctcgacagtgaactcactgagcgtgcggctgggaagctacgtccagaacatcttcaccgcggccaagctggtgatcgtggccatcatcatcatcagcgggctggtgctcctggcccaaggaaacacaaagaattttgataattctttcgagggcgcccagctgtctgtgggagccatcagcctggcgttttacaatggactctgggcctatgatggatggaatcaactcaattacatcacagaagaacttagaaacccttacagaaacctgcctttggccattatcatcgggatccccctggtgacggcgtgctacatcctcatgaacgtgtcctacttcaccgtgatgactgccaccgaactcctgcagtcccaggcggtggctgtgacatttggtgaccgtgttctctatcctgcttcttggatcgttccactttttgtggcattttcaaccatcggtgctgctaacgggacctgcttcacagcgggcagactcatttacgtggcgggccgggagggtcacatgctcaaagtgctttcttacatcagcgtcaggcgcctcactccagcccccgccatcatcttttatggtatcatagcaacgatttatatcatccctggtgacataaactcgttagtcaattatttcagctttgccgcatggctgttttatggcctgacgattctaggactcatcgtgatgagatttacaaggaaagagctggaaaggcctatcaaggtgcccgtagtcattcccgtcttgatgacactcatctctgtgtttttggttctggctccaatcatcagcaagcccacctgggagtacctctactgtgtgctgtttatattaagcggccttttattttacttcctgtttgtccactacaagtttggatgggctcagaaaatctcaaagccgattaccatgcaccttcagatgctaatggaagtggtcccaccggaggaagaccctgagtaacaagctccgtctcttgtagccaagtcagctgaatttattttcttaagcaatatttgtggttatttcttcctttttttcttacgaataaaatatactcagatgtttaaaa

SEQ ID NO: 222 - DNA, 1651 bp, Homo sapiens
  source 1..1651: mol_type = genomic DNA
tgctgaaccaagatttagctgtgcgccctccttgcagtctcctggaaccagcaggaggaaacatgggggatactggcctgagaaagcggagagaggatgagaagtcgatccagagccaagagcctaagaccaccagtctccaaaaggagctgggcctcatcagtggcatctccatcatcgtgggcaccatcattggctctgggatcttcgtttcctccaagtctgtgctcagcaacacggaagctgtggggccctgcctcatcatatgggcggcttgcggggtcctcgcgacgctgggtgccctgtgctttgcggagcttggcacaatgatcaccaagtcagggggagagtatccctacctgatggaggcctacgggcccatccccgcctacctcttctcctgggccagcctgatcgtcattaagcccacgtccttcgccatcatctgcctcagcttctccgagtatgtgtgtgcgcccttctatgtgggctgcaagcctcctcaaatcgttgtgaaatgcctggccgccgccgccatcttgttcatctcgacagtgaactcactgagcgtgcggctgggaagctacgtccagaacatcttcaccgcggccaagctggtgatcgtggccatcatcatcatcagcgggctggtgctcctggcccaaggaaacacaaagaattttgataattctttcgagggcgcccagctgtctgtgggagccatcagcctggcgttttacaatggactctgggcctatgatggatggaatcaactcaattacatcacagaagaacttagaaacccttacagaaacctgcctttggccattatcatcgggatccccctggtgacggcgtgctacatcctcatgaacgtgtcctacttcaccgtgatgactgccaccgaactcctgcagtcccaggcggtggctgtgacatttggtgaccgtgttctctatcctgcttcttggatcgttccactttttgtggcattttcaaccatcggtgctgctaacgggacctgcttcacagcgggcagactcatttacgtggcgggccgggagggtcacatgctcaaagtgctttcttacatcagcgtcaggcgcctcactccagcccccgccatcatcttttatggtatcatagcaacgatttatatcatccctggtgacataaactcgttagtcaattatttcagctttgctgcatggctgttttatggcctgacgattctaggactcatcgtgatgagatttacaaggaaagagctggaaaggcctatcaaggtgcccgtagtcattcccgtcttgatgacactcatctctgtgtttttggttctggctccaatcatcagcaagcccacctgggagtacctctactgtgtgctgtttatattaagcggccttttattttacttcctgtttgtccactacaagtttggatgggctcagaaaatctcaaagccgattaccatgcaccttcagatgctaatggaagtggtcccaccggaggaagaccctgagtaacaagctccgtctcttgtagccaagtcagctgaatttattttcttaagcaatatttgtggttatttcttcctttttttcctacgaataaaatatactcagatgtttaaaaaaaaaaaaaaaaaaaa

SEQ ID NO: 223 - DNA, 1814 bp, Homo sapiens
  source 1..1814: mol_type = genomic DNA
ggcacgagggcacgggcggtcagctgggccgcagctcctccggctctgcagggtcacggaggaaggtaagtaagccagctcccctagtccaggccgagcttgcacttgcgtcttgtctgctgctgctgaaccaagatttagctgtgcgccctccttgcagtctcctggaaccagcaggaggaaacatgggggatactggcctgagaaagcggagagaggatgagaagtcgatccagagccaagagcctaagaccaccagtctccaaaaggagctgggcctcatcagtggcatctccatcatcgtgggcaccatcattggctctgggatcttcgtttcccccaagtctgtgctcagcaacacggaagctgtggggccctgcctcatcatatgggcggcttgcggggtcctcgcgacgctgggtgccctgtgctttgcggagcttggcacaatgatcaccaagtcagggggagagtatccctacctgatggaggcctacgggcccatccccgcctacctcttctcctgggccagcctgatcgtcattaagcccacgtccttcgccatcatctgcctcagcttctccgagtatgtgtgtgcgcccttctatgtgggctgcaagcctcctcaaatcgttgtgaaatgcctggccgccgccgccatcttgttcatctcgacagtgaactcactgagcgtgcggctgggaagctacgtccagaacatcttcaccgcggccaagctggtgatcgtggccatcatcatcatcagcgggctggtgctcctggcccaaggaaacacaaagaattttgataattctttcgagggcgcccagctgtctgtgggagccatcagcctggcgttttacaatggactctgggcctatgatggatggaatcaactcaattacatcacagaagaacttagaaacccttacagaaacctgcctttggccattatcatcgggatccccctggtgacggcgtgctacatcctcatgaacgtgtcctacttcaccgtgatgactgccaccgaactcctgcagtcccaggcggtggctgtgacatttggtgaccgtgttctctatcctgcttcttggatcgttccactttttgtggcattttcaaccatcggtgctgctaacgggacctgcttcacagcgggcagactcatttacgtggcgggccgggagggtcacatgctcaaagtgctttcttacatcagcgtcaggcgcctcactccagcccccgccatcatcttttatggtatcatagcaacgatttatatcatccctggtgacataaactcgttagtcaattatttcagctttgctgcatggctgttttatggcctgacgattctaggactcatcgtgatgagatttacaaggaaagagctggaaaggcctatcaaggtgcccgtagtcattcccgtcttgatgacactcatctctgtgtttttggttctggctccaatcatcagcaagcccacctgggagtacctctactgtgtgctgtttatattaagcggccttttattttacttcctgtttgtccactacaagtttggatgggctcagaaaatctcaaagccgattaccatgcaccttcagatgctaatggaagtggtcccaccggaggaagaccctgagtaacaagctccgtctcttgtagccaagtcagctgaatttattttcttaagcaatatttgtggttatttcttcctttttttcttacgaataaaatatactcagatgtttaaaaaaaaaaaaaaaaaaaaaaaaaaaaaaaaaaaaaaaaaaaaaaaaaaaaaaaaaaaa

SEQ ID NO: 224 - DNA, 1664 bp, Homo sapiens
  source 1..1664: mol_type = genomic DNA
cgagcaggcacgggcggtcagctgggccgcagctcctccggctctgcagggtcacggaggaagtctcctggaaccagcaggaggaaacatgggggatactggcctgagaaagcggagagaggatgagaagtcgatccagagccaagagcctaagaccaccagtctccaaaaggagctgggcctcatcagtggcatctccatcatcgtgggcaccatcattggctctgggatcttcgtttcccccaagtctgtgctcagcaacacggaagctgtggggccctgcctcatcatatgggcggcttgcggggtcctcgcgacgctgggtgccctgtgctttgcggagcttggcacaatgatcaccaagtcagggggagagtatccctacctgatggaggcctacgggcccatccccgcctacctcttctcctgggccagcctgatcgtcattaagcccacgtccttcgccatcatctgcctcagcttctccgagtatgtgtgtgcgcccttctatgtgggctgcaagcctcctcaaatcgttgtgaaatgcctggccgccgccgccatcttgttcatctcgacagtgaactcactgagcgtgcggctgggaagctacgtccagaacatcttcaccgcggccaagctggtgatcgtggccatcatcatcatcagcgggctggtgctcctggcccaaggaaacacaaagaattttgataattctttcgagggcgcccagctgtctgtgggagccatcagcctggcgttttacaatggactctgggcctatgatggatggaatcaactcaattacatcacagaagaacttagaaacccttacagaaacctgcctttggccattatcatcgggatccccctggtgacggcgtgctacatcctcatgaacgtgtcctacttcaccgtgatgactgccaccgaactcctgcagtcccaggcggtggctgtgacatttggtgaccgtgttctctatcctgcttcttggatcgttccactttttgtggcattttcaaccatcggtgctgctaacgggacctgcttcacagcgggcagactcatttacgtggcgggccgggagggtcacatgctcaaagtgctttcttacatcagcgtcaggcgcctcactccagcccccgccatcatcttttatggtatcatagcaacgatttatatcatccctggtgacataaactcgttagtcaattatttcagctttgccgcatggctgttttatggcctgacgattctaggactcatcgtgatgagatttacaaggaaagagctggaaaggcctatcaaggtgcccgtagtcattcccgtcttgatgacactcatctctgtgtttttggttctggctccaatcatcagcaagcccacctgggagtacctctactgtgtgctgtttatattaagcggccttttattttacttcctgtttgtccactacaagtttggatgggctcagaaaatctcaaagccgattaccatgcaccttcagatgctaatggaagtggtcccaccggaggaagaccctgagtaacaagctccgtctcttgtagccaagtcagctgaatttattttcttaagcaatatttgtggttatttcttcctttttttcttacgaataaaatatactcagatgtttaaaaaaa

SEQ ID NO: 225 - DNA, 1790 bp, Homo sapiens
  source 1..1790: mol_type = genomic DNA
ccatttctagggttggaccgagcaggcacgggcggtcagctgggccgcagctcctccggctctgcagggtcacggaggaagccagctcccctagtccaggccgagcttgcacttgcgtcttgtctgctgctgctgaaccaagatttagctgtgcgccctccttgcagtctcctggaaccagcaggaggaaacatgggggatactggcctgagaaagcggagagaggatgagaagtcgatccagagccaagagcctaagaccaccagtctccaaaaggagctgggcctcatcagtggcatctccatcatcgtgggcaccatcattggctctgggatcttcgtttcccccaagtctgtgctcagcaacacggaagctgtggggccctgcctcatcatatgggcggcttgcggggtcctcgcgacgctgggtgccctgtgctttgcggagcttggcacaatgatcaccaagtcagggggagagtatccctacctgatggaggcctacgggcccatccccgcctacctcttctcctgggccagcctgatcgtcattaagcccacgtccttcgccatcatctgcctcagcttctccgagtatgtgtgtgcgcccttctatgtgggctgcaagcctcctcaaatcgttgtgaaatgcctggccgccgccgccatcttgttcatctcgacagtgaactcactgagcgtgcggctgggaagctacgtccagaacatcttcaccgcggccaagctggtgatcgtggccatcatcatcatcagcgggctggtgctcctggcccaaggaaacacaaagaattttgataattctttcgagggcgcccagctgtctgtgggagccatcagcctggcgttttacaatggactctgggcctatgatggatggaatcaactcaattacatcacagaagaacttagaaacccttacagaaacctgcctttggccattatcatcgggatccccctggtgacggcgtgctacatcctcatgaacgtgtcctacttcaccgtgatgactgccaccgaactcctgcagtcccaggcggtggctgtgacatttggtgaccgtgttctctatcctgcttcttggatcgttccactttttgtggcattttcaaccatcggtgctgctaacgggacctgcttcacagcgggcagactcatttacgtggcgggccgggagggtcacatgctcaaagtgctttcttacatcagcgtcaggcgcctcactccagcccccgccatcatcttttatggtatcatagcaacgatttatatcatccctggtgacataaactcgttagtcaattatttcagctttgccgcatggctgttttatggcctgacgattctaggactcatcgtgatgagatttacaaggaaagagctggaaaggcctatcaaggtgcccgtagtcattcccgtcttgatgacactcatctctgtgtttttggttctggctccaatcatcagcaagcccacctgggagtacctctactgtgtgctgtttatattaagcggccttttattttacttcctgtttgtccactacaagtttggatgggctcagaaaatctcaaagccgattaccatgcaccttcagatgctaatggaagtggtcccaccggaggaagaccctgagtaacaagctccgtctcttgtagccaagtcagctgaatttattttcttaagcaatatttgtggttatttcttcctttttttcttacgaataaaatatactcagatgttaaaaaaaaaaaaaaaaaaaaaaaaaaaaaa

SEQ ID NO: 226 - DNA, 1724 bp, Homo sapiens
  source 1..1724: mol_type = genomic DNA
attttctagggttggaccgagcaggcacgggcggtcagctgggccgcagctcctccggctctgcagggtcacggaggaagccagctcccctagtccaggccgagcttgcacttgcgtcttgcctgctgctgctgaaccaagatttagctgtgcgccctccttgcagtctcctggaaccagcaggaggaaacatgggggatactggcctgagaaagcggagagaggatgagaagtcgatccagagccaagagcctaagaccaccagtctccaaaaggagctgggcctcatcagtggcatctccatcatcgtgggcaccatcattggctctgggatcttcgtttcccccaagtctgtgctcagcaacacggaagctgtggggccctgcctcatcatatgggcggcttgcggggtcctcgcgacgctgggtgccctgtgctttgcggagcttggcacaatgatcaccaagtcagggggagagtatccctacctgatggaggcctacgggcccatccccgcctacctcttctcctgggccagcctgatcgtcattaagcccacgtccttcgccatcatctgcctcagcttctccgagtatgtgtgtgcgcccttctatgtgggctgcaagcctcctcaaatcgttgtgaaatgcctggtcgccgccgccatcttgttcatctcgacagtgaactcactgagcgtgcggctgggaagctacgtccagaacatcttcaccgcggccaagctggtgatcgtggccatcatcatcatcagcgggctggtgctcctggcccaaggaaacacaaagaattttgataattctttcgagggcgcccagctgtctgtgggagccatcagcctggcgttttacaatggactctgggcctatgatggatggaatcaactcaattacatcacagaagaacttagaaacccttacagaaacctgcctttggccattatcatcgggatccccctggtgacggcgtgctacatcctcatgaacgtgtcctacttcaccgtgatgactgccaccgaactcctgcagtcccaggcggtggctgtgacatttggtgaccgtgttctctatcctgcttcttggatcgttccactttttgtggcattttcaaccatcggtgctgctaacgggacctgcttcacagcgggcagactcatttacgtggcgggccgggagggtcacatgctcaaagtgctttcttacatcagcgtcaggcgcctcactccagcccccgccatcatcttttatggtatcatagcaacgatttatatcatccctggtgacataaactcgttagtcaattatttcagctttgccgcatggctgttttatggcctgacgattctaggactcatcgtgatgagatttacaaggaaagagctggaaaggcctatcaaggtgcccgtagtcattcccgtcttgatgacactcatctctgtgtttttggttctggctccaatcatcagcaagcccacctgggagtacctctactgtgtgctgtttatattaagcggccttttattttacttcctgtttgtccactacaagtttggatgggctcagaaaatctcaaagccgattaccatgcaccttcagatgctaatggaagtggtcccaccggaggaagaccctgagtaacaagctccgtctcttgtagccaagtcagctgaatttattttcttaagcaatatttgtggttatttcttc

SEQ ID NO: 227 - DNA, 1761 bp, Homo sapiens
  source 1..1761: mol_type = genomic DNA
ccatttctagggttggaccgtgcaggcacgggcggtcagctgggccgcagctcctccggctctgcagggtcacggaggaagccagctcccctagtccaggccgagcttgcacttgcgtcttgtctgctgctgctgaaccaagatttagctgtgcgccctccttgcagtctcctggaaccagcaggaggaaacatgggggatactggcctgagaaagcggagagaggatgagaagtcgatccagagccaagagcctaagaccaccagtctccaaaaggagctgggcctcatcagtggcatctccatcatcgtgggcaccatcattggctctgggatcttcgtttcccccaagtctgtgctcagcaacacggaagctgtggggccctgcctcatcatatgggcggcttgcggggtcctcgcgacgctgggtgccctgtgctttgcggagcttggcacaatgatcaccaagtcagggggagagtatccctacctgatggaggcctacgggcccatccccgcctacctcttctcctgggccagcctgatcgtcattaagcccacgtccttcgccatcatctgcctcagcttctccgagtatgtgtgtgcgcccttctatgtgggctgcaagcctcctcaaatcgttgtgaaatgcctggccgccgccgccatcttgttcatctcgacagtgaactcactgagcgtgcggctgggaagctacgtccagaacatcttcaccgcggccaagctggtgatcgtggccatcatcatcatcagcgggctggtgctcctggcccaaggaaacacaaagaattttgataattctttcgagggcgcccagctgtctgtgggagccatcagcctggcgttttacaatggactctgggcctatgatggatggaatcaactcaattacatcacagaagaacttagaaacccttacagaaacctgcctttggccattatcatcgggatccccctggtgacggcgtgctacatcctcatgaacgtgtcctacttcaccgtgatgactgccaccgaactcctgcagtcccaggcggtggctgtgacatttggtgaccgtgttctctatcctgcttcttggatcgttccactttttgtggcattttcaaccatcggtgctgctaacgggacctgcttcacagcgggcagactcatttacgtggcgggccgggagggtcacatgctcaaagtgctttcttacatcagcgtcaggcgcctcactccagcccccgccatcatcttttatggtatcatagcaacgatttatatcatccctggtgacataaactcgttagtcaattatttcagctttgccgcatggctgttttatggcctgacgattctaggactcatcgtgatgagatttacaaggaaagagctggaaaggcctatcaaggtgcccgtagtcattcccgtcttgatgacactcatctctgtgtttttggttctggctccaatcatcagcaagcccacctgggagtacctctactgtgtgctgtttatattaagcggccttttattttacttcctgtttgtccactacaagtttggatgggctcagaaaatctcaaagccgattaccatgcaccttcagatgctaatggaagtggtcccaccggaggaagaccctgagtaacaagctccgtctcttgtagccaagtcagctgaatttattttcttaagcaatatttgtggttatttcttcctttttttcttacgaataaaatatactcagatgttt

SEQ ID NO: 228 - protein, 487 aa, Homo sapiens
MGDTGLRKRREDEKSIQSQEPKTTSLQKELGLISGISIIVGTIIGSGIFVSPKSVLSNTEAVGPCLIIWAACGVLATLGALCFAELGTMITKSGGEYPYLMEAYGPIPAYLFSWASLIVIKPTSFAIICLSFSEYVCAPFYVGCKPPQIVVKCLAAAAILFISTVNSLSVRLGSYVQNIFTAAKLVIVAIIIISGLVLLAQGNTKNFDNSFEGAQLSVGAISLAFYNGLWAYDGWNQLNYITEELRNPYRNLPLAIIIGIPLVTACYILMNVSYFTVMTATELLQSQAVAVTFGDRVLYPASWIVPLFVAFSTIGAANGTCFTAGRLIYVAGREGHMLKVLSYISVRRLTPAPAIIFYGIIATIYIIPGDINSLVNYFSFAAWLFYGLTILGLIVMRFTRKELERPIKVPVVIPVLMTLISVFLVLAPIISKPTWEYLYCVLFILSGLLFYFLFVHYKFGWAQKISKPITMHLQMLMEVVPPEEDPE

SEQ ID NO: 229 - DNA, 20 bp, synthetic construct
  misc_feature 1..20: note = Synthetic sequence; gRNA Recognition Sequence
  source 1..20: mol_type = other DNA
tctggatggacatgcccacg

SEQ ID NO: 230 - DNA, 20 bp, synthetic construct
  misc_feature 1..20: note = Synthetic sequence; gRNA Recognition Sequence
  source 1..20: mol_type = other DNA
cggtattcaagtactcccgg

SEQ ID NO: 231 - DNA, 20 bp, synthetic construct
  misc_feature 1..20: note = Synthetic sequence; gRNA Recognition Sequence
  source 1..20: mol_type = other DNA
ctggccctgaagacccacgt

SEQ ID NO: 232 - DNA, 20 bp, synthetic construct
  misc_feature 1..20: note = Synthetic sequence; gRNA Recognition Sequence
  source 1..20: mol_type = other DNA
actgctccctaggcaccgag

SEQ ID NO: 233 - DNA, 20 bp, synthetic construct
  misc_feature 1..20: note = Synthetic sequence; gRNA Recognition Sequence
  source 1..20: mol_type = other DNA
ctggatggacatgcccacgt

SEQ ID NO: 234 - DNA, 20 bp, synthetic construct
  misc_feature 1..20: note = Synthetic sequence; gRNA Recognition Sequence
  source 1..20: mol_type = other DNA
tcatcaggggatagttccag

SEQ ID NO: 235 - DNA, 20 bp, synthetic construct
  misc_feature 1..20: note = Synthetic sequence; gRNA Recognition Sequence
  source 1..20: mol_type = other DNA
gggcactgattatctccatg

SEQ ID NO: 236 - DNA, 20 bp, synthetic construct
  misc_feature 1..20: note = Synthetic sequence; gRNA Recognition Sequence
  source 1..20: mol_type = other DNA
atgcctttgagaatggacgg

SEQ ID NO: 237 - DNA, 20 bp, synthetic construct
  misc_feature 1..20: note = Synthetic sequence; gRNA Recognition Sequence
  source 1..20: mol_type = other DNA
ccaagtcaccgacgtcgaca

SEQ ID NO: 238 - DNA, 20 bp, synthetic construct
  misc_feature 1..20: note = Synthetic sequence; gRNA Recognition Sequence
  source 1..20: mol_type = other DNA
ccggcaccttgtcgttcccg

SEQ ID NO: 239 - DNA, 20 bp, synthetic construct
  misc_feature 1..20: note = Synthetic sequence; gRNA Recognition Sequence
  source 1..20: mol_type = other DNA
ggtgggattgatggtctcag

SEQ ID NO: 240 - DNA, 20 bp, synthetic construct
  misc_feature 1..20: note = Synthetic sequence; gRNA Recognition Sequence
  source 1..20: mol_type = other DNA
ccagccagcaaagtagcgga

SEQ ID NO: 241 - DNA, 20 bp, synthetic construct
  misc_feature 1..20: note = Synthetic sequence; gRNA Recognition Sequence
  source 1..20: mol_type = other DNA
ggtgggggaagatcagtgcg

SEQ ID NO: 242 - DNA, 20 bp, synthetic construct
  misc_feature 1..20: note = Synthetic sequence; gRNA Recognition Sequence
  source 1..20: mol_type = other DNA
cctcacaacgtccacagacg

SEQ ID NO: 243 - DNA, 20 bp, synthetic construct
  misc_feature 1..20: note = Synthetic sequence; gRNA Recognition Sequence
  source 1..20: mol_type = other DNA
ctggatccgcgggaacgaca

SEQ ID NO: 244 - DNA, 20 bp, synthetic construct
  misc_feature 1..20: note = Synthetic sequence; gRNA Recognition Sequence
  source 1..20: mol_type = other DNA
aggaaggagccacctatgag

SEQ ID NO: 245 - DNA, 20 bp, synthetic construct
  misc_feature 1..20: note = Synthetic sequence; gRNA Recognition Sequence
  source 1..20: mol_type = other DNA
gcactcacacttccatcggt

SEQ ID NO: 246 - DNA, 20 bp, synthetic construct
  misc_feature 1..20: note = Synthetic sequence; gRNA Recognition Sequence
  source 1..20: mol_type = other DNA
gccctcagcgatcagcctca

SEQ ID NO: 247 - DNA, 20 bp, synthetic construct
  misc_feature 1..20: note = Synthetic sequence; gRNA Recognition Sequence
  source 1..20: mol_type = other DNA
tgcccccttaaagaagttcg

SEQ ID NO: 248 - DNA, 20 bp, synthetic construct
  misc_feature 1..20: note = Synthetic sequence; gRNA Recognition Sequence
  source 1..20: mol_type = other DNA
ctgcgaggggacgatgagga

SEQ ID NO: 249 - DNA, 20 bp, synthetic construct
  misc_feature 1..20: note = Synthetic sequence; gRNA Recognition Sequence
  source 1..20: mol_type = other DNA
gcacctccttggtctaactg

SEQ ID NO: 250 - DNA, 20 bp, synthetic construct
  misc_feature 1..20: note = Synthetic sequence; gRNA Recognition Sequence
  source 1..20: mol_type = other DNA
ttgtatccacagttagacca

SEQ ID NO: 251 - DNA, 20 bp, synthetic construct
  misc_feature 1..20: note = Synthetic sequence; gRNA Recognition Sequence
  source 1..20: mol_type = other DNA
tccatcaaccagagcatcgg

SEQ ID NO: 252 - DNA, 20 bp, synthetic construct
  misc_feature 1..20: note = Synthetic sequence; gRNA Recognition Sequence
  source 1..20: mol_type = other DNA
ctcccaccataggtaccatg

SEQ ID NO: 253 - DNA, 20 bp, synthetic construct
  misc_feature 1..20: note = Synthetic sequence; gRNA Recognition Sequence
  source 1..20: mol_type = other DNA
tatccacagttagaccaagg

SEQ ID NO: 254 - DNA, 20 bp, synthetic construct
  misc_feature 1..20: note = Synthetic sequence; gRNA Recognition Sequence
  source 1..20: mol_type = other DNA
ggtacctattgttgaaccag

SEQ ID NO: 255 - DNA, 20 bp, synthetic construct
  misc_feature 1..20: note = Synthetic sequence; gRNA Recognition Sequence
  source 1..20: mol_type = other DNA
aaggaaaaggggatcgtggt

SEQ ID NO: 256 - DNA, 20 bp, synthetic construct
  misc_feature 1..20: note = Synthetic sequence; gRNA Recognition Sequence
  source 1..20: mol_type = other DNA
aaaacactgaagagaaccgc

SEQ ID NO: 257 - DNA, 20 bp, synthetic construct
  misc_feature 1..20: note = Synthetic sequence; gRNA Recognition Sequence
  source 1..20: mol_type = other DNA
tagcgaggctggatggacac

SEQ ID NO: 258 - DNA, 20 bp, synthetic construct
  misc_feature 1..20: note = Synthetic sequence; gRNA Recognition Sequence
  source 1..20: mol_type = other DNA
ttccatcaaccagagcatcg

SEQ ID NO: 259 - DNA, 20 bp, synthetic construct
  misc_feature 1..20: note = Synthetic sequence; gRNA Recognition Sequence
  source 1..20: mol_type = other DNA
ccacgagaccctctaccaga

SEQ ID NO: 260 - DNA, 20 bp, synthetic construct
  misc_feature 1..20: note = Synthetic sequence; gRNA Recognition Sequence
  source 1..20: mol_type = other DNA
gaggctggatggacactggt

SEQ ID NO: 261 - DNA, 20 bp, synthetic construct
  misc_feature 1..20: note = Synthetic sequence; gRNA Recognition Sequence
  source 1..20: mol_type = other DNA
ctctaccagaaggacagcca

SEQ ID NO: 262 - DNA, 20 bp, synthetic construct
  misc_feature 1..20: note = Synthetic sequence; gRNA Recognition Sequence
  source 1..20: mol_type = other DNA
aatatccttaccttgaatgg

SEQ ID NO: 263 - DNA, 20 bp, synthetic construct
  misc_feature 1..20: note = Synthetic sequence; gRNA Recognition Sequence
  source 1..20: mol_type = other DNA
ggatttctcggaactgccgg

SEQ ID NO: 264 - DNA, 20 bp, synthetic construct
  misc_feature 1..20: note = Synthetic sequence; gRNA Recognition Sequence
  source 1..20: mol_type = other DNA
actgagcacagcgctctgag

SEQ ID NO: 265 - DNA, 20 bp, synthetic construct
  misc_feature 1..20: note = Synthetic sequence; gRNA Recognition Sequence
  source 1..20: mol_type = other DNA
cctcccaccataggtaccat

SEQ ID NO: 266 - DNA, 20 bp, synthetic construct
  misc_feature 1..20: note = Synthetic sequence; gRNA Recognition Sequence
  source 1..20: mol_type = other DNA
caccctgctaaagcccaaca

SEQ ID NO: 267 - DNA, 20 bp, synthetic construct
  misc_feature 1..20: note = Synthetic sequence; gRNA Recognition Sequence
  source 1..20: mol_type = other DNA
ctgccagtatgttactgaga

SEQ ID NO: 268 - DNA, 20 bp, synthetic construct
  misc_feature 1..20: note = Synthetic sequence; gRNA Recognition Sequence
  source 1..20: mol_type = other DNA
gggccttgtagacagcagcc

SEQ ID NO: 269 - DNA, 20 bp, synthetic construct
  misc_feature 1..20: note = Synthetic sequence; gRNA Recognition Sequence
  source 1..20: mol_type = other DNA
ctccaatcacagctacccaa

SEQ ID NO: 270 - DNA, 20 bp, synthetic construct
  misc_feature 1..20: note = Synthetic sequence; gRNA Recognition Sequence
  source 1..20: mol_type = other DNA
gttcttaccacttaaagacg

SEQ ID NO: 271 - DNA, 20 bp, synthetic construct
  misc_feature 1..20: note = Synthetic sequence; gRNA Recognition Sequence
  source 1..20: mol_type = other DNA
agcaggtgtatactacgtga

SEQ ID NO: 272 - DNA, 20 bp, synthetic construct
  misc_feature 1..20: note = Synthetic sequence; gRNA Recognition Sequence
  source 1..20: mol_type = other DNA
acagggaactgctttatcag

SEQ ID NO: 273 - DNA, 20 bp, synthetic construct
  misc_feature 1..20: note = Synthetic sequence; gRNA Recognition Sequence
  source 1..20: mol_type = other DNA
actccagcaacaacttgatg

SEQ ID NO: 274 - DNA, 20 bp, synthetic construct
  misc_feature 1..20: note = Synthetic sequence; gRNA Recognition Sequence
  source 1..20: mol_type = other DNA
tggacagcgtccatactggt

SEQ ID NO: 275 - DNA, 20 bp, synthetic construct
  misc_feature 1..20: note = Synthetic sequence; gRNA Recognition Sequence
  source 1..20: mol_type = other DNA
gagcagcagataaaatccga

SEQ ID NO: 276 - DNA, 20 bp, synthetic construct
  misc_feature 1..20: note = Synthetic sequence; gRNA Recognition Sequence
  source 1..20: mol_type = other DNA
gagttcttaccgaaatctgt

SEQ ID NO: 277 - DNA, 20 bp, synthetic construct
  misc_feature 1..20: note = Synthetic sequence; gRNA Recognition Sequence
  source 1..20: mol_type = other DNA
ccagtcaacacattacctcc

SEQ ID NO: 278 - DNA, 20 bp, synthetic construct
  misc_feature 1..20: note = Synthetic sequence; gRNA Recognition Sequence
  source 1..20: mol_type = other DNA
gtaacctgtgagactggacc

SEQ ID NO: 279 - DNA, 20 bp, synthetic construct
  misc_feature 1..20: note = Synthetic sequence; gRNA Recognition Sequence
  source 1..20: mol_type = other DNA
tcttaccgaaatctgtaggt

SEQ ID NO: 280 - DNA, 20 bp, synthetic construct
  misc_feature 1..20: note = Synthetic sequence; gRNA Recognition Sequence
  source 1..20: mol_type = other DNA
ggacgtagaaggcattcctg

SEQ ID NO: 281 - DNA, 20 bp, synthetic construct
  misc_feature 1..20: note = Synthetic sequence; gRNA Recognition Sequence
  source 1..20: mol_type = other DNA
attaccaagactcccaggac

SEQ ID NO: 282 - DNA, 20 bp, synthetic construct
  misc_feature 1..20: note = Synthetic sequence; gRNA Recognition Sequence
  source 1..20: mol_type = other DNA
cagatcagcccatacctgac

SEQ ID NO: 283 - DNA, 20 bp, synthetic construct
  misc_feature 1..20: note = Synthetic sequence; gRNA Recognition Sequence
  source 1..20: mol_type = other DNA
ttggacagcgtccatactgg

SEQ ID NO: 284 - DNA, 20 bp, synthetic construct
  misc_feature 1..20: note = Synthetic sequence; gRNA Recognition Sequence
  source 1..20: mol_type = other DNA
gctgtccaaagagaatccta

SEQ ID NO: 285 - DNA, 20 bp, synthetic construct
  misc_feature 1..20: note = Synthetic sequence; gRNA Recognition Sequence
  source 1..20: mol_type = other DNA
gtatccaaaacccaccagta

SEQ ID NO: 286 - DNA, 20 bp, synthetic construct
  misc_feature 1..20: note = Synthetic sequence; gRNA Recognition Sequence
  source 1..20: mol_type = other DNA
ttcctgttcagcttcgccat

SEQ ID NO: 287 - DNA, 20 bp, synthetic construct
  misc_feature 1..20: note = Synthetic sequence; gRNA Recognition Sequence
  source 1..20: mol_type = other DNA
tctttggacagcgtccatac

SEQ ID NO: 288 - DNA, 20 bp, synthetic construct
  misc_feature 1..20: note = Synthetic sequence; gRNA Recognition Sequence
  source 1..20: mol_type = other DNA
ggctggcattatagatgctg

SEQ ID NO: 289 - DNA, 20 bp, synthetic construct
  misc_feature 1..20: note = Synthetic sequence; gRNA Recognition Sequence
  source 1..20: mol_type = other DNA
ggtgactatagcgacgagag

SEQ ID NO: 290 - DNA, 20 bp, synthetic construct
  misc_feature 1..20: note = Synthetic sequence; gRNA Recognition Sequence
  source 1..20: mol_type = other DNA
gcataacccgacgagtagca

SEQ ID NO: 291 - DNA, 20 bp, synthetic construct
  misc_feature 1..20: note = Synthetic sequence; gRNA Recognition Sequence
  source 1..20: mol_type = other DNA
gatgaactaccaccgaccgt

SEQ ID NO: 292 - DNA, 20 bp, synthetic construct
  misc_feature 1..20: note = Synthetic sequence; gRNA Recognition Sequence
  source 1..20: mol_type = other DNA
ccattgcagataaactcacg

SEQ ID NO: 293 - DNA, 20 bp, synthetic construct
  misc_feature 1..20: note = Synthetic sequence; gRNA Recognition Sequence
  source 1..20: mol_type = other DNA
ccgtcacacaaataaacgcg

SEQ ID NO: 294 - DNA, 20 bp, synthetic construct
  misc_feature 1..20: note = Synthetic sequence; gRNA Recognition Sequence
  source 1..20: mol_type = other DNA
caccatcacagacaaacgat

SEQ ID NO: 295 - DNA, 20 bp, synthetic construct
  misc_feature 1..20: note = Synthetic sequence; gRNA Recognition Sequence
  source 1..20: mol_type = other DNA
gcatcctagaggaattgccg

SEQ ID NO: 296 - DNA, 20 bp, synthetic construct
  misc_feature 1..20: note = Synthetic sequence; gRNA Recognition Sequence
  source 1..20: mol_type = other DNA
gaaatgacagttatccgaag

SEQ ID NO: 297 - DNA, 20 bp, synthetic construct
  misc_feature 1..20: note = Synthetic sequence; gRNA Recognition Sequence
  source 1..20: mol_type = other DNA
ccatcacagacccaagactg

SEQ ID NO: 298 - DNA, 20 bp, synthetic construct
  misc_feature 1..20: note = Synthetic sequence; gRNA Recognition Sequence
  source 1..20: mol_type = other DNA
tcctagaactcagtcaatcg

SEQ ID NO: 299 - DNA, 20 bp, synthetic construct
  misc_feature 1..20: note = Synthetic sequence; gRNA Recognition Sequence
  source 1..20: mol_type = other DNA
tgacaaacgcaacgactgtg

SEQ ID NO: 300 - DNA, 20 bp, synthetic construct
  misc_feature 1..20: note = Synthetic sequence; gRNA Recognition Sequence
  source 1..20: mol_type = other DNA
aataaacgtagccatcactt

SEQ ID NO: 301 - DNA, 20 bp, synthetic construct
  misc_feature 1..20: note = Synthetic sequence; gRNA Recognition Sequence
  source 1..20: mol_type = other DNA
aaaaacctaacaaatccaag

SEQ ID NO: 302 - DNA, 20 bp, synthetic construct
  misc_feature 1..20: note = Synthetic sequence; gRNA Recognition Sequence
  source 1..20: mol_type = other DNA
ctgttcgattggtacagtca

SEQ ID NO: 303 - DNA, 20 bp, synthetic construct
  misc_feature 1..20: note = Synthetic sequence; gRNA Recognition Sequence
  source 1..20: mol_type = other DNA
cagcactgttacaatatgag

SEQ ID NO: 304 - DNA, 20 bp, synthetic construct
  misc_feature 1..20: note = Synthetic sequence; gRNA Recognition Sequence
  source 1..20: mol_type = other DNA
gggttatgcgagccaacaag

SEQ ID NO: 305 - DNA, 20 bp, synthetic construct
  misc_feature 1..20: note = Synthetic sequence; gRNA Recognition Sequence
  source 1..20: mol_type = other DNA
attgcacataaactccgtgg

SEQ ID NO: 306 - DNA, 20 bp, synthetic construct
  misc_feature 1..20: note = Synthetic sequence; gRNA Recognition Sequence
  source 1..20: mol_type = other DNA
gaacatttatgaacatcatg

SEQ ID NO: 307 - DNA, 20 bp, synthetic construct
  misc_feature 1..20: note = Synthetic sequence; gRNA Recognition Sequence
  source 1..20: mol_type = other DNA
catggactgcaattccccag

SEQ ID NO: 308 - DNA, 20 bp, synthetic construct
  misc_feature 1..20: note = Synthetic sequence; gRNA Recognition Sequence
  source 1..20: mol_type = other DNA
gaacgcgggctatcacagtg

SEQ ID NO: 309 - DNA, 20 bp, synthetic construct
  misc_feature 1..20: note = Synthetic sequence; gRNA Recognition Sequence
  source 1..20: mol_type = other DNA
tgtagaaacgccgcccctag

SEQ ID NO: 310 - DNA, 20 bp, synthetic construct
  misc_feature 1..20: note = Synthetic sequence; gRNA Recognition Sequence
  source 1..20: mol_type = other DNA
ggcgccggcactcatcactg

SEQ ID NO: 311 - DNA, 20 bp, synthetic construct
  misc_feature 1..20: note = Synthetic sequence; gRNA Recognition Sequence
  source 1..20: mol_type = other DNA
agaaacgccgcccctagtgg

SEQ ID NO: 312 - DNA, 20 bp, synthetic construct
  misc_feature 1..20: note = Synthetic sequence; gRNA Recognition Sequence
  source 1..20: mol_type = other DNA
aggcccttatgggtcttccg

SEQ ID NO: 313 - DNA, 20 bp, synthetic construct
  misc_feature 1..20: note = Synthetic sequence; gRNA Recognition Sequence
  source 1..20: mol_type = other DNA
tccagaaatttccaaacggg

SEQ ID NO: 314 - DNA, 20 bp, synthetic construct
  misc_feature 1..20: note = Synthetic sequence; gRNA Recognition Sequence
  source 1..20: mol_type = other DNA
atggagatccagctgaacgg

SEQ ID NO: 315 - DNA, 20 bp, synthetic construct
  misc_feature 1..20: note = Synthetic sequence; gRNA Recognition Sequence
  source 1..20: mol_type = other DNA
ccataagggcctgcgcaagg

SEQ ID NO: 316 - DNA, 20 bp, synthetic construct
  misc_feature 1..20: note = Synthetic sequence; gRNA Recognition Sequence
  source 1..20: mol_type = other DNA
agtccttgtagaatcggcgc

SEQ ID NO: 317 - DNA, 20 bp, synthetic construct
  misc_feature 1..20: note = Synthetic sequence; gRNA Recognition Sequence
  source 1..20: mol_type = other DNA
accacgcccaccaccactag

SEQ ID NO: 318 - DNA, 20 bp, synthetic construct
  misc_feature 1..20: note = Synthetic sequence; gRNA Recognition Sequence
  source 1..20: mol_type = other DNA
gcagcttcttggtatgccag

SEQ ID NO: 319 - DNA, 20 bp, synthetic construct
  misc_feature 1..20: note = Synthetic sequence; gRNA Recognition Sequence
  source 1..20: mol_type = other DNA
aactgtgactcactgagccc

SEQ ID NO: 320 - DNA, 20 bp, synthetic construct
  misc_feature 1..20: note = Synthetic sequence; gRNA Recognition Sequence
  source 1..20: mol_type = other DNA
ggcgccgattctacaaggac

SEQ ID NO: 321 - DNA, 20 bp, synthetic construct
  misc_feature 1..20: note = Synthetic sequence; gRNA Recognition Sequence
  source 1..20: mol_type = other DNA
gtgccggcgccgattctaca

SEQ ID NO: 322 - DNA, 20 bp, synthetic construct
  misc_feature 1..20: note = Synthetic sequence; gRNA Recognition Sequence
  source 1..20: mol_type = other DNA
ggcataccaagaagctgccg

SEQ ID NO: 323 - DNA, 20 bp, synthetic construct
  misc_feature 1..20: note = Synthetic sequence; gRNA Recognition Sequence
  source 1..20: mol_type = other DNA
tgaagctccggagacctcga

SEQ ID NO: 324 - DNA, 20 bp, synthetic construct
  misc_feature 1..20: note = Synthetic sequence; gRNA Recognition Sequence
  source 1..20: mol_type = other DNA
accaagggtcgaggcgtcaa

SEQ ID NO: 325 - DNA, 20 bp, synthetic construct
  misc_feature 1..20: note = Synthetic sequence; gRNA Recognition Sequence
  source 1..20: mol_type = other DNA
aagaggtggcgggacacaga

SEQ ID NO: 326 - DNA, 20 bp, synthetic construct
  misc_feature 1..20: note = Synthetic sequence; gRNA Recognition Sequence
  source 1..20: mol_type = other DNA
tgacatcaatgacctcactc

SEQ ID NO: 327 - DNA, 20 bp, synthetic construct
  misc_feature 1..20: note = Synthetic sequence; gRNA Recognition Sequence
  source 1..20: mol_type = other DNA
tgtagcccaggaaggccgtg

SEQ ID NO: 328 - DNA, 20 bp, synthetic construct
  misc_feature 1..20: note = Synthetic sequence; gRNA Recognition Sequence
  source 1..20: mol_type = other DNA
tgccccataagaggagccac

SEQ ID NO: 329 - DNA, 20 bp, synthetic construct
  misc_feature 1..20: note = Synthetic sequence; gRNA Recognition Sequence
  source 1..20: mol_type = other DNA
cagacccagaccacctaccg

SEQ ID NO: 330 - DNA, 20 bp, synthetic construct
  misc_feature 1..20: note = Synthetic sequence; gRNA Recognition Sequence
  source 1..20: mol_type = other DNA
tgaagtagatccccaccgtg

SEQ ID NO: 331 - DNA, 20 bp, synthetic construct
  misc_feature 1..20: note = Synthetic sequence; gRNA Recognition Sequence
  source 1..20: mol_type = other DNA
ggccactcacggactcatgg

SEQ ID NO: 332 - DNA, 20 bp, synthetic construct
  misc_feature 1..20: note = Synthetic sequence; gRNA Recognition Sequence
  source 1..20: mol_type = other DNA
atgaagtagatccccaccgt

SEQ ID NO: 333 - DNA, 20 bp, synthetic construct
  misc_feature 1..20: note = Synthetic sequence; gRNA Recognition Sequence
  source 1..20: mol_type = other DNA
atcaacgatgccccggtagg

SEQ ID NO: 334 - DNA, 20 bp, synthetic construct
  misc_feature 1..20: note = Synthetic sequence; gRNA Recognition Sequence
  source 1..20: mol_type = other DNA
gcaatcaacgatgccccggt

SEQ ID NO: 335 - DNA, 20 bp, synthetic construct
  misc_feature 1..20: note = Synthetic sequence; gRNA Recognition Sequence
  source 1..20: mol_type = other DNA
gatgaagtagatccccaccg

SEQ ID NO: 336 - DNA, 20 bp, synthetic construct
  misc_feature 1..20: note = Synthetic sequence; gRNA Recognition Sequence
  source 1..20: mol_type = other DNA
tgttgctatagaccccaaac

SEQ ID NO: 337 - DNA, 20 bp, synthetic construct
  misc_feature 1..20: note = Synthetic sequence; gRNA Recognition Sequence
  source 1..20: mol_type = other DNA
gtgggccactcacggactca

SEQ ID NO: 338 - DNA, 20 bp, synthetic construct
  misc_feature 1..20: note = Synthetic sequence; gRNA Recognition Sequence
  source 1..20: mol_type = other DNA
gaagtagatccccaccgtgg

SEQ ID NO: 339 - DNA, 20 bp, synthetic construct
  misc_feature 1..20: note = Synthetic sequence; gRNA Recognition Sequence
  source 1..20: mol_type = other DNA
tacatgcacatcttcctagc

SEQ ID NO: 340 - DNA, 20 bp, synthetic construct
  misc_feature 1..20: note = Synthetic sequence; gRNA Recognition Sequence
  source 1..20: mol_type = other DNA
tttgtagccggactttgatg

SEQ ID NO: 341 - DNA, 20 bp, synthetic construct
  misc_feature 1..20: note = Synthetic sequence; gRNA Recognition Sequence
  source 1..20: mol_type = other DNA
tgagggacacccccacggtg

SEQ ID NO: 342 - DNA, 20 bp, synthetic construct
  misc_feature 1..20: note = Synthetic sequence; gRNA Recognition Sequence
  source 1..20: mol_type = other DNA
tctacttcatcacctatgaa

SEQ ID NO: 343 - DNA, 20 bp, synthetic construct
  misc_feature 1..20: note = Synthetic sequence; gRNA Recognition Sequence
  source 1..20: mol_type = other DNA
acacccgtttgacactgtaa

SEQ ID NO: 344 - DNA, 20 bp, synthetic construct
  misc_feature 1..20: note = Synthetic sequence; gRNA Recognition Sequence
  source 1..20: mol_type = other DNA
cagtgtcaaacgggtgtccc

SEQ ID NO: 345 - DNA, 20 bp, synthetic construct
  misc_feature 1..20: note = Synthetic sequence; gRNA Recognition Sequence
  source 1..20: mol_type = other DNA
gctcctcggaacagcccccg

SEQ ID NO: 346 - DNA, 20 bp, synthetic construct
  misc_feature 1..20: note = Synthetic sequence; gRNA Recognition Sequence
  source 1..20: mol_type = other DNA
gccccccaccccggtaccag

SEQ ID NO: 347 - DNA, 20 bp, synthetic construct
  misc_feature 1..20: note = Synthetic sequence; gRNA Recognition Sequence
  source 1..20: mol_type = other DNA
tcattcccttgaagaagccc

SEQ ID NO: 348 - DNA, 20 bp, synthetic construct
  misc_feature 1..20: note = Synthetic sequence; gRNA Recognition Sequence
  source 1..20: mol_type = other DNA
ggcccgccgctcctggtggg

SEQ ID NO: 349 - DNA, 20 bp, synthetic construct
  misc_feature 1..20: note = Synthetic sequence; gRNA Recognition Sequence
  source 1..20: mol_type = other DNA
atgtagcacgccgtcaccag

SEQ ID NO: 350 - DNA, 20 bp, synthetic construct
  misc_feature 1..20: note = Synthetic sequence; gRNA Recognition Sequence
  source 1..20: mol_type = other DNA
tgaagtaggacacgttcatg

SEQ ID NO: 351 - DNA, 20 bp, synthetic construct
  misc_feature 1..20: note = Synthetic sequence; gRNA Recognition Sequence
  source 1..20: mol_type = other DNA
gaagggcgcacacacatact

SEQ ID NO: 352 - DNA, 20 bp, synthetic construct
  misc_feature 1..20: note = Synthetic sequence; gRNA Recognition Sequence
  source 1..20: mol_type = other DNA
gccctgcctcatcatatggg

SEQ ID NO: 353 - DNA, 20 bp, synthetic construct
  misc_feature 1..20: note = Synthetic sequence; gRNA Recognition Sequence
  source 1..20: mol_type = other DNA
gcacaatgatcaccaagtca

SEQ ID NO: 354 - DNA, 20 bp, synthetic construct
  misc_feature 1..20: note = Synthetic sequence; gRNA Recognition Sequence
  source 1..20: mol_type = other DNA
catttcacaacgatttgagg

SEQ ID NO: 355 - DNA, 20 bp, synthetic construct
  misc_feature 1..20: note = Synthetic sequence; gRNA Recognition Sequence
  source 1..20: mol_type = other DNA
cgcaagccgcccatatgatg

SEQ ID NO: 356 - DNA, 20 bp, synthetic construct
  misc_feature 1..20: note = Synthetic sequence; gRNA Recognition Sequence
  source 1..20: mol_type = other DNA
ttcactgtcgagatgaacac

SEQ ID NO: 357 - DNA, 20 bp, synthetic construct
  misc_feature 1..20: note = Synthetic sequence; gRNA Recognition Sequence
  source 1..20: mol_type = other DNA
cattatcatcgggatccccc

SEQ ID NO: 358 - DNA, 20 bp, synthetic construct
  misc_feature 1..20: note = Synthetic sequence; gRNA Recognition Sequence
  source 1..20: mol_type = other DNA
ggtcccgttagcagcaccga

SEQ ID NO: 359 - DNA, 20 bp, synthetic construct
  misc_feature 1..20: note = Synthetic sequence; gRNA Recognition Sequence
  source 1..20: mol_type = other DNA
tcagcaacacggaagctgtg

SEQ ID NO: 360 - DNA, 20 bp, synthetic construct
  misc_feature 1..20: note = Synthetic sequence; gRNA Recognition Sequence
  source 1..20: mol_type = other DNA
cagtgaactcactgagcgtg

SEQ ID NO: 361 - DNA, 20 bp, synthetic construct
  misc_feature 1..20: note = Synthetic sequence; gRNA Recognition Sequence
  source 1..20: mol_type = other DNA
agagtatccctacctgatgg

SEQ ID NO: 362 - DNA, 20 bp, synthetic construct
  misc_feature 1..20: note = Synthetic sequence; gRNA Recognition Sequence
  source 1..20: mol_type = other DNA
acaatgatcaccaagtcagg

SEQ ID NO: 363 - DNA, 20 bp, synthetic construct
  misc_feature 1..20: note = Synthetic sequence; gRNA Recognition Sequence
  source 1..20: mol_type = other DNA
agagtccattgtaaaacgcc

SEQ ID NO: 364 - DNA, 20 bp, synthetic construct
  misc_feature 1..20: note = Synthetic sequence; gRNA Recognition Sequence
  source 1..20: mol_type = other DNA
agtggaacgatccaagaagc

SEQ ID NO: 365 - DNA, 20 bp, synthetic construct
  misc_feature 1..20: note = Synthetic sequence; gRNA Recognition Sequence
  source 1..20: mol_type = other DNA
tgttgctgagcacagacttg

SEQ ID NO: 366 - DNA, 20 bp, synthetic construct
  misc_feature 1..20: note = Synthetic sequence; gRNA Recognition Sequence
  source 1..20: mol_type = other DNA
agtggcatctccatcatcgt

SEQ ID NO: 367 - DNA, 20 bp, synthetic construct
  misc_feature 1..20: note = Synthetic sequence; gRNA Recognition Sequence
  source 1..20: mol_type = other DNA
gtggccatcatcatcatcag

SEQ ID NO: 368 - DNA, 20 bp, synthetic construct
  misc_feature 1..20: note = Synthetic sequence; gRNA Recognition Sequence
  source 1..20: mol_type = other DNA
actcaccacagccaccgcct
